United States Patent Application Publication US 2026/0258423 A1 - sequence listing, part 62

SEQ ID NO: 301568 - DNA, 83257441 bp, Homo sapiens (residues 49,100,562-51,235,368 of 83,257,441)
  source 1..83257441: mol_type = genomic DNA
attaaaaatacaaaaattagctaggtgtgatggcttgtgcctgtagtcccagatagttgggaagctggggtgggaggatcacctgtgcctggggaggtagaagttgcagtgagccatgatggcaccactgtactccagcctgggtgacagggtgagacactctcaaaaaaataaaaaaagtggggagcttgaggaccctaggtccctggtgatgtaaaactgccttatcagctctgaattaccttcctctgaatgtcttgttatatgagataaacaaagctgccacatttttcagagttatgtgagacaaataaaactgccactttcaagccacatttttgagagtctcttttttgtgtgtgaattttttttttttttttaagaggcagggtctcactaggttgcccaggctggtttcaaactcctgggctcaagtaatcctcctaccttggcttcctaaagcactgggattacaggtatgagccaccatgccagccccctagcagtctttaagtgctcaaagctaaaaagagtttacaatcctgagggtgtgtgcataaacggagacaggatataaacaagactgaataatgggacagataagccctggcttgctaatctatcacagataaagcgatgtggttagaagctcctggaactttttctatggttaaatccgaagcaatgcagaattccactccagctcaccacctctctttagtcatcctgcggttcctaggcctgggaccttacagcactgccatcaggcacccaaccaaaccttgtgatgtcaggtaccctgaggcttacacagtgccacctgtgtaagtggcacctgtgattggatgagtcacctttgtaaacagtgcaggtagaaaatatggttacaaataactgcaaacaaaatctgcacactcatcacttgactacctaggttctcaatggagcctctgaactaaccatggaataaatgcaactgtgtggtattcccaggggagtcagataacaggcagacaatgccactagatgccctttagagtggaaggtcattttgttcctcagcaaaatggccctagagaagttgggagctgatgggggtgtcactgagtaatggatgaatgactccaagcatggacaaaagctgcctgtgtagctttggtggtaactgtggctggctctcctactagtactatgttctctttatttacttgagaacaagtttgccaggtccaggtgatgaaaagcagtgcccctagatcatctctgtccctgctttcctgtctgggcctgtgcatgggcagaacagatccccttaagagagtcacagctctgacaaaccaagaaactttcttaacgtgtttgagtagaacagggagtcagtggtacatggagagctgaggatttacagatggaatggatatttattaagtattccaaatccagccagggcctgaaattcatgggcatgatggcataaagactgtgtggctctgtaacacaggatgagagatgtgagagagctgtggccactggttgggacattataaattagtcagaatgagtcacaactagagctaaacagaagagggcacaaggataattctcttaaaatttgtgtgggctgggcatggtggctcatgcctgtaatcccagcactttgggaggccgaggcgggacaattgcttgagcccaggagttcaaaaccagcctgggtaacatggtgaaacctcatctctacacacacacagacacacacacacacacgaacaaaaaaacaaacaaaaaacctactgggtgtgatggtgcatgcctgtagtctcagctatttgggaggctgaggtaggaggatcacttgagcctaagaagcaagtgaagcctgcagtgagccatgatcatgccactgcactccagcctgggtgacagagtgagatctcatctgaaaaaaaaaaattctgtggcttcctgaagcacaggctggaggatactgagctgtgtgttgaagaggaaaatactggtatcagttaacacttggtctttgacatgaggattctagcttatagcctgatgtggtatttaacatcctcatccagccatggaaatatcccctttagagccaggtactgaatatatggaaaaaaatgtgtgtgtgtgtgtgtgtgtgtgtattatatataagatacatatataagttattatgttattatatattatatataatatatataatattattatatatcatatataagatatataagatagatatatgatatatataagtgagatatatataagatatatctcatcttatatataagatagatatataagatagatatctatcttatatatatcatatatatcttatgtataagatagatatataggatagatatctatcttatatatatcttatatatctatcttatatatcttatatatctatcatatatatctatcatatatatctatcttatatctatcttatatatatcttacatatatcttatatatcttatatatcatatatctatcttatatatatcttatatatatctatcttttatatatatcttatatatctatcttatatctatcttatatatatctatcatatataagatatacatatctatcttatatataagatagatccatcttatatataatatatacatacataatacatacgtgtgtgtgtgcgtgtatatatatatatacacacatatatacaaagggtacttccttttttttttttttttttgagatatagtcttgctctgccaggctggagtacagtggcgccatctcagctcactgcaacctctgcctcccgggttcaagcaattctcctgcctcagactccccagtagctgggactacaggcacgtgccaccacgcccagctaatttttgtatttttaagtagagacggggtttcaccatgttggtctactgacctcgtgatccgcccgcctcggcctccgtaagtgctgggattataggcgtaagccacggtgcatggccccacgaagggtacttctttacggagccagctcaattctccctcacaattttcatacataggccacaaatattagaaaaagatcaccaagaaatgtagtagcttggcagtgcaaggatagaatcattttaaaataacagctttatgccttagccataaaatacagctgaaatcactgctgccgatgaaactctgtggctggtgccagaacggtacataacttggaaacagaaattgtgggaagtggcttcagaatttaataacgaacattttattattttcagaagtataggaaactgtgttaatgtttataaatatcaaacactgggaatttatggtcataaatgccaaccaagaaaaaaaaaggacacccgtttgtagaaaagtgaaagttcagctaccttatgtcctggttggtgctttttggataagaaagctgtgatgttaatacttaaaatcacctcccatgtggtccaaacccacagatcctagatctcaaattcttatgtggaaatttgggattctcgtaaatttcaaaagccaacatatcttcttggaaccttccattttcttccaatactcagatatagaaagagaaaaaatggagtcttaagaaagctattggctgggtgcagtggcttacactgtaatcccagcactgtgtgaggccaaggcgggaggatcacttgagcccaggagttcagagaccagcctggccaacctgatgaaaccctgtctctacaaaaaatacaaaaattagctgagcgtgtggcatgtgcctatagtcccagcttcttgggaggcggaggtgggaggattgcctaagcctgggaggtggagtttgcagtgagctgtgatggtgccactgcactccagcctgggtgacagagtgagaccctgtctcaaaataagtaaataaaattaaaaaagcaaaccattggtgaacagctttgatttctagaccagtttttgaggccgatggctattttaaggaggtgtataaagctactgtttaccataacagtgttgtgtaacaaaccaccccaaagttagtgggatccaacagtaagcagtaactatcacactcatgctcacaggtcagtcagtgggtcagccagagcagctctgcttcacgatctctcattcctcaggagccacaacattttcttcccatgacaatggcagtggcataagcaaagttaatagaaacatgcaacgcccctgaagtcctgggctcgttctggcacactgtcacttcgtcccataccccattggctaatgcaagtcacacggccaatcccaacactagtggagtgggaaagtatacttaacctctgatgggaggaactactaatctaataccaagtcacatcacagagggcacagatacaactgggaactataatatcatctacttggccgggtgctgtggctcatgcctgtaattccagaactttgggaggccgaggcaggggatcacctgagatcaggagttcgagactagcctggccaacatggcaaaaccccatctctactaaaaatccaagaattagcagggcacggtggcatgtgcctgtaatcccagctactcaggaggctgaggcaggagaattgctagaacccaggaggtggaggttgcagtgagctgagatggcgtcactgcactccagcttggatgacagaatgacactctgactcaaaaaaaaaaaaaaaaatctactctaggtggtacgttcaccagcagtttagcgcgaggaggtgtatatgacccgggattgtgatgacaacgtcgagaggttgagaaagatgaaaacatatctaacgtgtacaggcatacattagacttagcaacatgatgatcattggtgaccttagcaaaagcaatgctggtgacacagtggcatggagtcctggtggggagattaagaaccgtggcagatgggggaatggtggcatcaaagatacacaactctttaggaaaatctggaggaagggaggaataaaggaaggagaacagcagctgaagagaaaaacagagcagacttttttgtttttagtaagagaaatgtgagcatgtttaaatattgcctgtaagggtccagtagagagggagaagttgaagatacaggagattgagaggctattgaaagggtgaggctctgagaagggggcagggagggacccagggaacaagtaggacttgcactgtgactaggagagggacctcaccaggtcctactcgacttacaatgaacttagaggtgacatcaattccctcatccttttcacaagcggtgtggttattccctgagtccattttccagtaacagaccaacagcacaaatctgaatatccctctgaccgtttcactactagatagaaccaacattggttttgtttctgtcatctagtatattagtcacacctctcatctttgaatcatctaccaagtgccatcgatatacaaattaatatttattcttcttatctttattctaagagtgttggtgtgagaaggtggagattattatagggaaaggatgggccaaaaggagagagtagaagttgaggcccagggaggtgaagctcaaggacacacagagctgggcacagttggagctgggatcatggttgggtctcttgcatcttggcttagggctccgccacaattagatagcccagtgagaaatgcggagcctcataaatcccgctttgtcctttattccatgtttagtatgttatctgtagatacgaatttaagagctgggcaaactccagtgtcatgctaatgaattttttttcagctataattaacacctggctaaaacagctaaagcagccaggccattgatcaccactttgcctggagccaggagagcctgctccagggaggtttcagtgactcactgaggacctaagctcatcctcttttcctgctctgccattctcactagtgtttctcttcatggtggagatgaagatggcatctccccaaatggagtgagtgggtcgggggctctctttcttgggggaatctttccctgaggttcctggcatgcttccccgaagcttcttcccagccccagccctagcccctggctgagccgcgtagaaaagtctggcacaacaagaagagcactgctggaatcctgatgtttcaaactcctttcctaagtgtggaagttccaggctaggaattccaacaatttcagaactggtggtgtttgcttcaaaaggagaaatgttgctggaatcccagaagccaccttcctatccctgggtcattccttgtctctgaggaagatctcactccttgtttactctagaaatgagtgttagtgggaaagtctgcaacaatgttagtgagatcaaggccactcagctcttgtactctgtgactcaagccatttatcttatcttgctctttccatgtgttgtgtaatgccaagcaaagccttggagaggggcaggttcattcaggtgcatttaggcctatagagaaaggaataatgtgctcaggatacagaatttgaagacattatggtggaattacataaggatgtgaaggagtgaatgaaatagcattaaaagaacctttggagtcttaaaaatgttagcaaatgagtatatataactatttagtatttactcctttgccaaacactgttctaaatgctttacttgtattaactctcaatatacttgatagccctttaagttaagtactattatcattatcattttacagataaagcaactaaagcacagagaggttaagggacttgcccatggtcacacagctacaaagtagaacagaaatttacccagacagtctgcctccagagtctatactcttacccaccttattacgctaacttactgctccttaagaaaatgaaagaaatgcaaaatccatccaagcaatgaagaaattagatgcaatctttgtgagggttgatcttgtcaactgaattgaggatgtcgaggcagaaatgtatttttatacacacacacacacacacacacacacacacacacacacacatttttgtttttagacacaaggtctcactatgttgcccaggctgaatttgactcctaggctcaagcaactctctgccttcagtctcctgagtagctgggactatgggtatgtgccgctgtgccaagaaataattttacaaacgtttattgaaagcaaaatgtgagaattgacctggaagacacaccaacaaagtcagaggtgttctggagtctgtcacatagtgaaagatttttatagaaaagtttaaaagaagggagggaggctcctcacaccagagttgtcccctcttcattggagggtacaatatagcagttatgatcattagataaaaattatatcatataggctaaaaaaaatgtctacatgaaagacactcagtagaacttcatacttcagctaatcctaaatcagcctcctagtcaatgtcaacaggccatacaatgattggtacatcaacagtctgaggaacttacaataagattccttactcagtggcagaatgtctccaagtcacaagacctctccaaagtggattgatttggaagcctgcttaacataatgtgacttgtaggttatcagttccccccttttgatcagactctttccacgggaagtggagactgcagtgagccgagagtgcgccactgcactccagtgtgggccacagagcgagattttatctcaaaaaaacaaaaacaaaacaaaacaaaacaaacaccaaaactcttcccgtggaaacattggtgatcagtctctgcttaggttggagtggcacaaacctgtggtactggctaggttggagtgaaagttcttcattccttggcactgggaagtctcattggcaggaagtcatgtttctcagcaggggagaaagagccttgttattgcatgtgggccaggttgctagcaaagtggggcagtcgtgatttgaagctattctcatgctattctcttgaataatgaatcacccccagcactaggagagcattattctggccttagtctttgacctaaagcaaacaaaaatgtaattcgtaagtaacttaatattcaggaaaataacagttatgctaatgattatagtaataacaacttgaagaccagaatggaataaaaacttagtcccgagggtaaccaacgaaaaaagtcatttagaggatcagtttttattatgcctgtaaccaattagccttttaaattaccatttctcaagtttccacttctatagaggtgttaatataggtacaacaagtagtacgagctactgtgcagacacctccttgtttagccaataaatagtccaaggcaattctgttatttagtactacctgggctaaagaatttaaagattttttgttgagctgcaatgctttttgcagtgtctccagctatctgatcaatggtagctgatgataggtttctaattatatgcagatcctcttagcttgatgtagtcctcttacctctgtaagatagagaaaaaagggatctttttgttgatttttatgcaatgacaaaggatttagaaaatgtcctaacaagtatacaccttctgtctgccagctattaaagcaatgggcccatccttatgtaggcaaatcagtcccaatgccacatacaaacacagaacccatgggaggcaggtgattcccctcaaggtatttttgttaatagactcattcatggggagtaacaataccaaattaaatcagggatttcctcctttgcatgccttctggaatccatttacatggtagcctattgatttatattgttggcatagtagaggctcatttttatcttctttaacacatttgtttatccaataacacatggatcaaggaggtcctggagtatagtctgggttaaaactcaggccaaccttaacaaccagagacaaatttaaacagggggtgatagtattggggttatgaagttagacctagaaagttaatccccaaaggattgttctaaataagtggtgacaccagggacatctgaaaagtcagcgacaggtgttactaatggcatatattggtaatgaatagatctaggaatcatattgcagatccaaaaatcagctatgtttcccccagtggcaatactttgggatagtttaatcgaagtgctagccgggcatggtggctcatgcctgcaatcccagcactttgggaggcctaggcgggtggatcacttgagctcaggagtttgggaccagcctgggcaacatagcaagacctcatctctactaaaaaataataaaaataaaaaattatccaggcatggtggcacacacctgtggtgcccaggctaaggcaggaggagtgcctggctaattacgtttttctaaaaaattgagacagagtctcactgtgttgcccaggctggtcttgaactcctgggctcaagtgatcctcctgccttggcctcccaaagtgctgggattacaggcttgagccactgtgcctgacctggaggtcactctctgattaaacaatccactcagaagatttagtattttttaaaatgagaaaaatggacttcttttaattttgcagtgcaggggtgtgaggagtacctgataaggacctctccaacgaagctggagagaatctttaaaaaggtcttttccaggatactaaatcacctggttttaagttatgaaattttttgtcttcacctcttgggagtgcactatggaaagtcccttaccagccagctgttattaagaaacttaacaaagtttttacaatagcgtagaatttcaccttttagtcctgttgaattaaaactagggtcctgtgatgatgaaggctaatcagtaatgattgcatatggagacaatttatgttttccaaaaggagtggatctcatgttaagcaagaccagtggaagagccttaggccatataaggttaaaagcttctgttaacttagccagttgggtttttatagtcccattagtgcgcttaaccaacccagaagactgagggtgagaggcacaatggaagtgttgtataataggcaagatttcacaaattgatttcatgaccagtcctgtaaaatggattcctcatcactgtggagtcccaaggggattccccaatatgggataatgcattctcatagcattcctcctactgttaaggtggtggctcttctgcatagaaaggcttccacccaataagaaaacatgcaaatcataaccaggacatatttgtagccttgggagggtggtgtctggataaaatccaattgctacacctcagaaggtccaagggataagggaaagtgcccaggagtgctatggaaagacttgcccatgtgatacatcctttgcaaccaggggcactggttgatatatctagatgccaccttctctgctacagtaaatgatggttttcaatccccactcagtcatctttttgggaccccagtgggtccccaacttgtatacacactccaaaaatggaaactgcaatccagtgggcattatgggtttgttatctggatctgggccataccatatacgagtctgagaagaatattgtctccattttccttcccaaaccttattttctgtatctggggcagcctgttgagcctccctcaatattgaggggtttaatttgaatatttgtatgaaataagagttaggggaaccaaatttcttagttaaggcaacttctttagctacctgatttgcaaaatagttgcctctagcttcaggctcatttcctttagagcggggtatccagtcttttggcttccctggcccacattggaagaagaagaattgtcttgggccacacataaaatatgctaatgctaacaatagctgatgagctaaaaaaagaaatcacaaaaaaacctcataatattttaagaaagtttatgaatttatgaatttgtgttgggctgcattcaaagccgtcctgggcctcatgtggcctgcaggttgtgggttggacaagcttgctttagagtgtctcaggccttttttttttttttgagacagggtctcactctgttgcccagagtagagcgagtacagtggtgcaatcatggctcactgcagcctcgacctcctaggctcaagtgatcctcctatcccagcctcctgaatagctgggactataggtgtgtgccaccacacctggctaaatttttgtattttttgtagagaggggtttcaccatgttgcccaggcaggtctcaaactcctgggctcaagcaatctgcctgcctttgtctcccaaagtgttgggattacatgcgtgattacaggtgtgagccaccacacctggcgctaggactttgataatggccaaagctttaggttttttgaactgcacctaagagctctgaaacttgtttttcatttttagtgctctgcccagcagaggtaaggaatactctttgttttcatagcataccaaaatcatgagccacaccaatggcatacctgctgtcagtataaacatttgcagtttttccttcaactaagaaacaaacacgagttgaagttgctaattctgccttctgggctgatgaaacattaggtaatcatccatcctcgataacatccttgatcacgtacttgaaactactgtataacctgcagaaaatttcctatctttacttctcaagtaggatccatctgtgaaccaaataaaatctggattgtacaaggttctttcctgtaactcagctcttgggagaaggagttgagcagttaagtgtcaaacagttatggtgagatgcgttgaatggaaggggcaaaagcgtagcagagttcaactattgcattgagtaatagttacgttaggagatgaaagtaaaaggatctcataagaagccagtggactcattgattaacattgggtgtgatatgaatttaagagtgcttcaatggaatgaatggagcatatatagttatgggggacccattgttatttcttctatagacctaaatagcagggcaatagctgaaatagcacttagacatgggggcaggccttgagccactgagtccaccctctggttgtaataccctgtgggtctgttatgattcccatgtttttgtataagaactctcaaggcattcccatgtgtttaatgcacaaataaagagaaaggcattttgtaatttgggtgtcctaaagctggagttccattagggcttgtttagtttgatttatggctttctggcttttttctgtccatattaatagctctggctggtcaatttttagtaattcacaaagaggttgggtcattggagaaaaatcaggattacagttttgacgatatcctgccaatcagaggaagcctcatagctatttcttagtgtttggttttagaaaggcaattatgcctttaactctatcagagttgatggaaaacccctccttagatattgaatgacccaaacatttaacttgttcttggcataactggagtttttctttagagagtttgtgacatttgcctgtgagttgccttagaagatgcaggcacccccatatgagtgagcatatgtgatatttgtctttctgtgcctggcttaaataagctacttaatataatgtcctccagttccatctgcattgttgcaaatgataggatttcaatcttttttatggctgaataatattccattgcatgtatgtgccacattttctttatctattcatctatggatggacacctaggttgattccatatcttggctattgtaaatagtgctgcagtaaacatgggagtgtggatgttcttttgataaacttgttaccagaagctgggaagggtagtggggagagggataaaaagggggtggttaatgagtaaaaaaatacagttagatagaagaaataagatctagtatttggtagcacaatagggttactattttttttttttttttgagacaaaatctcactctgttgcccaagctggagtgcactggcatgatcttggctcactgcaacctccacctcccgggttcaagcagttctcccacctcagcttcctgagtagctgggactacaagcacgtgccaccatgctcagctaatttttgtattttttggtagagacggggtttcactatgttggcccagctggtcttgaactcctgaccttgtgatccacccgccttggcctcccaaagtgctgggattacaggcatgagccaccgtgcccagctgggagactattgttaacaataatttattgtatattttaaatgtttgaggtagtagataactctaattaccctgatttgatcattacacattgtatgcttgtatcaaaacctcacatgtaccccataaatatgtacaactattatatatccataataattaaaaataaaacatctttagaaagatgcaggctatcctgctgaaaagtaaacaagttaggtgaacaaagaagtaaatcatctatgtactaaagtaaagtagaaacatttcaagtgagacatcatttagataaactttcaggatcagtgaaaaataaatggggctttcaatatacccttgaggtataacagtccaagtatactgtcaattattctgagtaaggcaaacagatactggctattaggatccacaataattctaatagacactacataagtgtactactgtaaaaatggtgctattcttgggaatgttagctaacaaagtgtgtggattgggaaccacagggtgctgtggcactacagtgttgttgatagccgttaagtcctgtacaaatccccatccttcaccattaggcttttgaacaggcagaataggggtgctgcatggactggtgcagagaaggataaatcccttcttgatatactctttaattatgggtttaattctttggagtgcctctggtcacaaaagatactacttgacgtttgatttttaagggtttacttccattttaatggtagtagctgaaagaatttccccaatttcagtgaaagactgggaccacagtgggctagcaaggtatcaagcaaattgtttgatagactcagaagacttttctgaggggccagaggttgctgaacaaatttaaatagaacaagcaggggaagaaaaatttaagtgacatgtcagttggttctgcttcagttggttctactgacaggttcaaatacattatcccctttggaaaaaaagaaatatgtgcattgtgtaattctaggaaatctctcccaagaaggtgagtcagggctgaaggtacaagtaaaaattcatgataatggactaaggtatctaattggaaaggcaacagtaaggttttgtgcacagtcatgggtcggttagagatttccaccatgtttaaggtttctgcactccaaggaaggggccctttaaggaggtggaatttaaaacagataaagttgctccagtatcaattaaagccttggtcttttcaccattagtagttaaattcatttcaccaagggcattagaaggaaaggaaaggaccctggaatttcctcaaagcagtcttactctgatggttctgtcatggccttttcttccagttgccacttgagctttctggaatcctttttgatgtgaccaggattcttacaataaaaacgtacatttctctgatctggtgagggctgaaactgctgtttttgaaatccctgttgtggattggccaactgttgctacttgaaagcttataatcctagcagatttagacttttcttttttgtggagaaggccacaatattaactagatcacatatctgagtggttgctcaatttatctgatgtcacttaacgagggtaacaaactcttagtcaaggccgttaagaaaagctgagcttaacatagattcatttttttctattattaacactgttatcagacacaccaaagtattgtttaaatgtctttttgaatcattcaaaattatctaaatctgttatgttaggaccttggcagcattgccaaattttacccaatctatatgttttggaaagacttttgggatggcatctaaaagctctctggctaaagcgctagcttctattctgttgtataccttcatttgctctattaaagttttccagaggattttgccaattagcatttttaatccatttggtgtccctctcttctgaaatcaatagtccccctagtagctgggaccacaggcacgtgccaatatgcctgtcaaatttttgtattttttgaagagatgggctcaagcaatccacctgccttggcctcccaaaatattggaattacaggcgtgaaccactgcacctgactatgacccaatttttatgttctgttttatcccagggagtataaacaagagcaggtgtgcctcagttagtagattttgtctggaatggacagggagcttctcaggaggatccaaaagcaagggaggagaaagaggagaattgagagttcagagcaaggaagttcagaaagggtagggtctagtggcatggaaaacatatcaacaaagttggaggtgctctggaatttgtcacaggtagatttttatagaaaaatttaaaagaagggagggggtaactccttatacctgagttgtcctcttttcattggaggggacaatacagaagttacaatcatttgctacagattacatcatacagattaattagtcattaattagtttggaagcctgcttaacataatgtgaagttatcagcttcagtatactcaaatttaatgaaagaattgatgatggtgtagcatggactcaaatggataggtcccatgagaactcctctgttactggatatagatttgcaattccagctggctgagcttttgtttaaaaagggctcagcacatctgtaagggagaatcaagttttgcatcccagtcaaaactttccatgtaataaacaactcagcctactgagatggtaatcctagttattgctgggtagagtgaaattgtcctcttagtaactaagtttatggacagttcagagttcatatatagagatgataaaataaatccattgtattagtacttttctgttatcttcaggaataacatgtattaataagcagttaagtaattgattctaaacacatgatttttaagagaaatatgtgagaatatatgaagtttataaacagtgatggaatgttcaaagataacttgagatttactatatgttatcagtttattagggttttctgattagatgcttagagaagttgtacttagctgatgaaacaagtgaaatgcttaaaaaagaaaaatgactatgttatctttaacaatgcaagttaaaatgtttagggaatttaattaactaagattgtcatggaaaagaaggctatctgaccaccaaataagctgggctccctttccacagaagtccactgtagtttgttgttgataggaactggctgcctgacgtgggactccattctcaacctcttgtggttaagtggaccaggtgaccagctatagtcagtgggagggagtagaagttaagtgtatcccctctgggccatcaggtttgggtatgtggcttgcttttcccatgaccttctttccattgtgtgttgacttcagaggccacacatcaaggatgaagactttaccagatggaaagagcctgagtccctgaatcactttttcttttatctgagacagagtctctctctgttgcccaggctgcagtgcagtggtgcaatctcagctcactgcaacctccacctcctgggttcaagccattctcttgcctcagcctccagagtagctgggattacaggtgcccgccaccactcctggctaatttttgtatttttagtagagacaggggtttcaccatgttggccaggctggttttgaactcctgacctcgggtgatctgcctgccttggcctcccaaagtgctgggattacagacgtgagccaccgtgcctggcccctgaatcactctttgttggaaagccacccaacagagtgacccaaacaggagcatccaggaaccacgaacaatggtctttacatgagcaagaaataaacttttattgtatgttaggccactaagatttcttagtagctattatcctgtgccgactgtttcagctgtgagaggggactgtgtgctatttagtctctgttcctccagctctgtcctcctccctactccaccctgttctgtgatccaggaggacatccattgtctgtgtgacccatgctcccttctcctcttgtttccagctgggttcagtcaatgggaagaaccagcaagagatgagaaagtaggaaaggaaagagggcagagtatttattccttcagctcccacctggccaggctgaagttgagcaagcaacagctgtggttccttcacctaaggctgcagctgtttctgggttcagctatcactgttgccacaccttgttcactcaagcctaaggcaataacagcttcctgctcttgctagtccctgagtgcttccccaacccttgttggtttccttaaccctatgcacatctctgtaaaaaggcccttgttcaaactccctgcagttacccccttttgagtgtgccaggttttctctcatgaaactgacattgactgatgtcagtttaaacttatttaaggaagtttaaatattcatcaaaggtcccttgaaacttcttcttcttattattttgagacagggtcttgcactgttctctaggctgaagtgcagtggtatgatcacggctcactgcaggcttgacctcccgggttcaagtgatcctcccacttcagcctctcaagtagctgggaccagaggtgtgtgccaccatgcccagctaatttttgtattttttgtagagataggattttgccatgttgccaaggctgaattatttttaaaatttattagatttattgatagaaatatgtcttaggtgacttttgcaataatgatgctatataacaaaccaccccaaccatgcttacaataaattttattctcatgcttatgggtatgaatatcaactatagttcagttgatctaggctgggcttagctgggtgactctgccacagactgctggccagctgcgcttggctccccctggccatgggttcagtttggatctgattcctgggttttctcctggggccaaggctgaacagacaataggtccctggggcatgttcttctaatagtggatcactggaactcaggagagaaagctgatccatacaaatgtatttcagcctctgcttgagtcctcatctgctaacatccctttggctatagtaaatattttggtcaagcccaaggttgaggggcattgtccattctgaggctatggcaatgtgtgatattcaactcttttataaggaagcaaggaattagaactaataattcatcccatcacaaattaaaaggtctgtttattgaatatggagcttgtacttgtgacttcactacatttatttatttatttattttgaaacagaatctcgctctgtcacccaggctggagtgtagtggcatgatctcagctcactgcaacctccgcctcctgggttcaagcgattctcctacctcagcctcccaagtagctgggattacatgtgtgtgccaccatgcccagctaatttttgtatttttagtagagacagggtctcatcatgttggccaagctggtctcaacctcctgacctcaaatgatctacctactttggcctccaaaagtgctgagattacaggcatgagccaccatggcctgcctacatttaatattaatttaaaccataataaccacaggagacttttcaatgcacaaaagatgcccttcaaataataattgctaatactgtggcaaatgttacttcccaagcactgttttaaggactttacatttattaactcatttaattcttaaaacaacctcatgaggtaggtgctgttatcatccacattttacaactgaagatgctgaggcacagagatgtttaatcacttgtttaagttcacacagcaggttgagagcagaagcagagccagcctctggaattcatcttttaactaggattgcactgcctcttgaagacatcaagataattcagaagataattgagaagaaatccacagcccgtcgagtctgcaccccctttgccctgctccacgtcaatgacatacacccattcacccatccttcttgactcccagggtcaggctgaagtcagctgggcagcatcctggacttctttcccttcctcactgttccggacttggccctggcccttcctgactgtcttcctgtctcccctgcatctctcccattctcactaacctggaccctccgcttcacccaggcagcagggcagatgtgggctgttgatccagtagaactgattccagtcccctctgtgtccccctagagttctaattttcactttcctcatgtgaaagggagacaaatacaacactgaagacccaagattgttctgagcattaaatgatagaatacaattcattcattcctttctccatcagatggtttttgaatatcaactatgagccagcccctgtgctggggatacaatggagagcaaaacaggagtggcactgcctttcagggaacaggggaaacagacagcaaacaaacatacacagagtaatatgcagttacaaactctgatcagcgttgtgactggaaggtactggatgctggctgtcagggcacgaaaagaggactctgacctagtctggtggctaggaaaggtctccttgaggaactaacatttaaccagaggcggaagggtaaaagagaaaagaagcacaggtgagtggaggagtcttttgtgtgtgtgtgtgtgtgtctgtgtgtgtgtgtgtgtgtgtgtgtgtgtgtgtgtatgtgtgaaacagtcttgccctattgcccaggctggagtgcagaggtgtgatcttggctcactgcaatctctgcctcctgagttcaagagattctccttcctcagcctcctgagtagctgggactacaggcatgcaccaccatgcctggctaatttttttttgtatttttagtagagacagggtttctccatgtcggccaggctggtctcaaattcctgggttcaagtgatccatccacctcggcttcccaaagtgctgggaatacgggtgtgagccactgtgcccagcctagaggagtgttttgaagacagggaaaatagcaggtgagaacttgaataagcttcacgcctcactgagatcctagggcaatctgtttagaaccttccccacgattgaggacccaactccacacacctattgcttaatcctcatccttgagcaagtgacaccacttgctttttccttgagattatgacaagcctggatattttgttctcacttcttcagtcctctgaagagctgacccctcatctttttcctttcaacatacatttattgagcaacagcaaaggctgaatttgaagaagaggaagggttactgatcatttgggtgggaaaacactcccagcactcatgggaatagttcattcagtcaatgaatggtgcctactctgagccaggcctgcgcaaggctctgggagcagagcaaggaataagacatggtctcatttctctagagtcaagcagttgctaactggcatcaccacctttttggggtggctcaaattgttctactttcttcttacctgagcactcctcttggtaggaattgctgttttaactgggccaagatgcaaaggtagcttaatcagtctttcaggaacaactttcagaaaactcagttatggcactagaatctgttggctgaatctggtcccatgtggaccacttgaagcttctcccataagggacgagtagacaggggcttgatggtgaaaggtaaaaagagtttgtcctttggccccgcaagaccagtgccagaggtgggtatactgggcactgggagtagctggaatgaccaaatacagaggagattcaggttacttaagaatttgccaatttgtcaaaggtgatagctggaaatgggtccacagccagggagaagaggaagtcctgtaacagtagtaaaatggacccaccacagtgaaaaagcctggggtcaccattgggggaagctatcctcagactgaccccagacagggcctgcagtgtgatgcacacaggctggacagctatcagggctccaggtggacttggacagccatctcttctttagtcctcagtgtaagaattaaagaaagaggaaagaaacacgaaaaatggctcaacagttaaagtcaggtttattttggagaataaacctgagaggggcttctggccaatttctgtcaggagtgctctctcttacagactaagagtattggttttagggtgagaaagcttatcacaggcttggaatgtttctgtgtgtgggggagaaatttattgcgggttggagtgtctctggtcggaggagaggttatctcagggctggcatgtctctggtcggggagggatttatcttatggttggaatgtttctggtcggagatgtcatttgtggtttatggtcatgctgaccttagccattaggctgatgccctttggatttaggcggcttttgatcaaggtgaacttaaaaatggtggtgcttgtccaagatggtgatgctcctgctctgtcaatccagaccctatagttataaaaaggaagagaggtggcatgttctttctagctacttcctgctgatgggaggacagagagttttctggtctcagattgactgtaggagtaatgtcgtctgtagatgtttttgggtagttgtctgtgaaatggccatgatcctgtcagttaaaaatatttgaaaaaggttaattaggcagggtaagaacattagtcctaggcatattattagaagagaaggcccagaaatgggatgacccatgctatgattttgttcccaaaccaataatctatttggttgttttggtattcccttaccttttcagccctttctttaaatttttcagcagtgtctcttactaggcccaactggttgagatagaaacaacattccttacctaatgagatgcagaggcacatgtttggaaaggcccgtgtgttactttttgttagtaaccatttttcctgctatgaggataataattaagcaaaatgctacagtaactgagattctctgtctgatattccaccccgaggctgctacagcatatagtcctactgcaaatagtagagtgagtaaagcagttcccacagggtggcatagtcgaaaatttccattaaaaggttttaatatttggctgagaaggagaggtaggaacgacaaaaagtatttggtgaagtaggggtgagactgagtaagatgactagttctcacttagttacttattttttatgattttcagcttaagatttcctatttctttacattgatatttaggatgttcctttgggctgtcaggggttgcttcctcagctttccaggctttgacttgagtgtgatgtatccaggagttgattcctgtaacagatactgtctcaattgccctggattccctggactcactagacgtgggggcaaaggattctgggcaccctcagttattagttgtcagtgccagcagtgaagagatttcctcctgtcatggttggaggcttataggcagcacctgctcaaacagctagttttcagttcatagggctttaagaaagcacagcttatttggaaacttgtagccagaaaagttagaatttaatttaaactgtagaaaataataaaaattgaaaaacatttggcaacactagaatttaataacaggtgtgctatagtttttgaaacataatttcctttctccaatttcccatttttattaaaagacaaatcatggtaggaatggcttgttttattatacttggcttaattatttgcatacagtgcagcaagaataattatttgttacataggccttttaaattggcattgatggaactttgttccatagaaggaatctcagataagactttttaaagctgagcccagccatggaattataccattaaatacctatgagtttccccttgagattccaaaataacttggggttcctggcctatcagaaagtgacattctttacttaccacagatcagaaaccctgtacagggactgtgtacacaaaacgtgaggccaatttcccaagagctttcttggcttcataagtcaggtttgattccttaaaggaaagcacaccattccagccaaagccttggtaaaataaccagtttttccaattgtgtcctgttacaaaagaaaacagattcttattgcacttatgcaaataactatattgccacaacttaagaatactcacagtttccaaattctggagaaaatcaggtagagagaaacaagtatgctccaaattttgttcatgggagtatactaaattgttaaaagctgtcaatagctcaaaagaaaagtttctttgactttgaaaagcaaaacaaaggattagcaatattttcagcaaaacgtcaaaaagatcacttcagtctcctattagttcagttaatgcagttaatttctgtcctgcttgatattaatgaacgttttagctcttcgagagtcctgaacgtttttcctctattctgatgtcacaatctccaaagttatcaaaaagctgcattcaagagcacctgttagagctttatagctgattataagactaccttctaaagaggaccaaaacaagacaacaattgtttatggatgacaaaaagttttagggtagccatagttaaagtcacaattgacaaggatatctgttacctttgtggcacacaatagttttaacataacaattataattactactgataacatacactaagatatatcagaattataggagtctcccataactttggaacacataccaataacatatttatacaaatatagtccaaagaaagccaaacaccattttctatttgacattgcttcctgtatgattttataccaaattttaccattatattagtgctattaatgttaagctcaatttttaataaaaccttgtagacaaatttaccgaattttaatgtttgaccataaagtaaagatttttataaaaatctttaaaaatagtctatagacccattataatttttgctaagagcaggttagtgctttaagagaaacctgttgtgcttttattttaatgctcaatttacagaaaaactggatgataccccttcaactttagccaatatgtttacacacagaatttcctttacaattaaccttccaaaaattgcttaaaccttcatttttattttattcaactaaaaacaattctttaaccttttaatctaggtaaaaaaccacattacattttcatgcctccttataatctttttaccaaaactatatgtaaactttttttaatagtcttaaatacatgttacacttaacttttagcaacctttacttttgttggtgagtttgggattttattttatttttatttatttatttttgagatggagtttcactcttgccacctaggctggagtgcaatggtgcaatcttgactcactgcaacctccacttcctgggttcaagcgattctcctgcctcagcctcccgagtagctgggattacaggcgagcgccaccattcctggctaatttttgtatttttaatagagacggggtttcaccatgttggccaggctgatctcgaactcctgacctcaggtgatcctcccgacttggcctcccaaagtgctgggattacagacatgagccactgttcctggccaagcttgggattttaattatgcactaggtgtagagcctaggacctagacagaagtgcagataaggtctgacttatcccagcatttaactccgtgtgtcgccgccatccggtctgggaggtgaggagcatctctgcccggctgcccgtcgtctgggatgtggggagcgcctctgcccggccgcggccccgtctggggggtgaggagcgtctccgccctgtggccgccccgtctgggagggaggtgggggtcggcccccgccgggccggccgccccgtcccggagggaggtgggggggtcagccccccgcccgtccggccgccccgtccgggaggtgaggggcacctctgcccggccgcccctactgggaagtgaggagcccctctgcccggccagccaccccgtccgggagggaggtgggggggtcggccccctgcccgaccagccgcaccgtctgggaggtgaggggtgcctctgcccgaccgcccctactgggaagtgaggagcccctctgcccggccgccaccccgtctgggaggtgtgcccagcagctcattgagagtgggccatgatgacaatggcggttttgtggaatagaaaggggggaaaggtggggaaaagattgagaaatcggatggttgccgtgtctgtgtagaaagaagtagacatgggaaacttttcattttgttctgtactaagaaaaattcttcggccttgggatcctgttgatctatgaccttacccccaaccctgtgctctctgaaacatgtgctgtgtccactcagggttaaatggattaagggcggtgcaagatgtgctttgttaaacagatgcttgacggcagcatgctcgttaagagtcaccaccactccctaatctcaagtacccagggacacaaacactgcggaaggctgcagggtgctctgcctaggaaaaccagagacctttgttcacttgtttatctgctgaccttccctccactattgtcctatgaccctgccaaatccccctctgtgagaaacacccaagaatgatcaataaaaaaaaaaaaaaaacaaactccgtgtgtcctaggacttacctagcttcagtgaaggccagttgtacagctaagagttatagtggcattgtataaagcattcaggaggcctaatcacttttaaatcgtacatttctttttttttctttctttcttttttttttttttttttgagatgcagtcttgctctgtcaccccaggctggagtacgttggttatattggtgcaatctcggctcattgcagtctccacctcctgggttcaagcaattctcactgcagtctccacctcctgggttcaagcaattctcaagctactcaacctcctgaatagctgggactataggtacgtgccactacgcccagctaaattaacttttgtgttttcagtagagacagagtttcaccatattagtcaggctggtctcgagctcctgacctcaggtgaaccacccgccttggcctcccaaagtgctgggattacaggcatgagccactgtgtccggcctaaattgtacctttcttgcataaattcccttttataaaattttttatgacttacacagacaatttctgatgtgcctcaacttgctgacttgttgtaaacattcctttctttaaacaaccagttaatttacttcaggacaagaatttaccatataagattcttttttatataaattaccttttctttaatttcaagattagaagttaggtatttcactaaacagttcaaggtgtagctatctttattaaaccaatattaatgttcctttatcaaaaaattacacaagcaaagattattctgtttgggctgagttacagttttatagcctctatgccaaattttgacaccttatagcatttggcagagataagtatgaaattgcttgattaataaatgcaaacaaaaatgtatcctggcaactcttaagacatttctaatcttactgtaccagtaagttttaaagattaaagtcatgtgaactgaaggtcccacaacttttactttgtccttaaaaatgtttaagtgcttatttttcttaggccaattaattagagcttttaaaatagatattgcacacataacacatatatagccacacagacaaccagaagaagatccagtaattataagatttaaaaaaaaaaatttccctattggattaatggccttctggtgaggccctttaaaaacaggactaggaaaacagtttccagggcctaataaacaagcatagctggaagacaaagacagattttgagaagcacttattcacctctaattctaggggttccataaggaaaacagatttttcccaaaacgggattcatggtgcctttttgttttcccaaggagtcccaggccaccagaagtcattttagggtctttcatatatgcaccaagaatggcaagacagagtggagaaaagtaattcagttgattgggagaaaacctttcctaggaaaataagatttatgaagagacaaaacataaaggccttttgaatatactcatagcttggatatccattttaattaagctgagcactcttttttttatcaggggtgagggtgaaggttagaattatataaatgtcaggccaggttaaaggattgggttatgtgcgggaattccctgcggtaatgagagggattttcatagaaagatcctaggtatgtttgatttgcaacaaatcagacatggagaaagggcataaacacaagcaatgccttcacccccagccactttccagagagggagaatggcagagatgatttgactggatggagcagtttttgaacgggtcacaggtggagaaggaggggaagcggggtttggggctgaaggcttgcgggcaggaggggctgccagggcagagggttcagatgggtgaggagcagatgcagagggatgagaatgcagagggggttcatctgcagggtcaaaaggagttttggaggaaggagttttgaaggaaggagtttcaggggaaggagagacctggggaaggttttcattaagaaggatttcatgaagggtgcaagcttgagacagagagggtcgggatctaaagtagaagaaagcctggcctgaatagagagaacctcttggcgtttgccattcctggttataaagttgtcattgtccctgagaatttgaaagtaaaaggtgccatatttgggccttcggctcgaaattttaacttgccattatttaatttgtacccgggccaggccatgttgcaataaaaatctgaacactttggctttatatttcctgtaagccaagttggtgaggttgtgaaggagacagcccagtggagaggatgtgggaatgcaggattgtttggtacccatgtggactggtaagaggaagccaagggtgtctgttttagttctaggcatccccagtcaaaaggcagagacccagaatcctctttataaagaggatggtcaagttgagaagaaactgggcatccccaagatttcttctagcttagtcccactggttctctgaagaccgggatggcagacctgactgtcccgagtaccatgagaaagaaaggggaaggcagatcttaccagttagctggattagtgtctgatgttggatgttccagctggaattggcaaagggcctcttggactggagccacaagaagtggggtggtggggagagaaagagagagacagagagagagagagagagatagagaggaggatgagggaggaggaggggagaaagcgaaatacctgatacccattgcaggcagtcagaggtggattcctgagacctgagggttttgagggctcactggagagtagccccagcccgagccttgcaggccctttcaggttagttgtcctcctcatgcaaattgctcaaaaagtaaagtgagagacaagatgggatgggtggccagagactctcaggatccagtgggatgagcagctgctgtccactgcttccttggttgcaagagagcctctatccccaacacccatcctggctttcagcaccaaatgtaagagttaaagaaagaggaaagaaacacaaaaagtggctcaacagtcaaaggtttattttggagaataaacctgagaggggcttctggccgattttttggtcagaagcattctgtcttacagactaggagtatttattggttttagggtgagacagcttatcacaagcttggaatatttctgtgtggggggggaagtttattgcagggttggaatgtctctggtcagaggagaggttatctcagggctggcatgtctctggttggggagggatttatcttatggttggaatgtttctggtccgagatgtcatttgtggtttatggtcatgctaaccttagccattaggctgatgccctttggatttaggtggtttttgatcaaggtgaactttaaaatggtggtgcttgtccaagatggtgatgctcctgtctgtcactcagggtagcagcagggcagctgcttggctgtggtctagacagtcagggaccacagctagctctgccaggcagaaaccctgatcaagctgaaaaagagtaaatattctcctttaatccactctgccttcctgcagtcatccctagagcagggagagaggatctacaaccatagagggttcaccttggaaccacaatcaccaatcacaacactaatgtgaagcaagagttatgcctgaactatcctcttccctgcttccaaaccacagatctgatggaaaagagctttcctacttaaatagagctggtgtggggaaaagagccactttatttcgaatgcgaatctgcctggttaaccccaagtcccaggagtgcctctaaaatgtctagttgggccaggcccagtggctaatgcctgtaatcccagcactttgggaggctgaggtgggtggatcacctgaggtcaggagttcaagaccagcctgaccaacatggtgaaaccctcgtctctactaaaaatacaaaattagccaggtgtggtggtgcatgcctataatcccagctacttaggaggcaggggcaggagaattgcttgaacccgggaggcagaggttgcagtgagccaagatcacaccactgcactccagcttgggcaatagagtgagactccatcttcaaagaaaaaaatgtctagttgtgtattactctttatgtatgaacacttattcattgtaagttttcttcttattgttgcagaaaccatagtttctgcctgtagcccctatgtattccttctagggtacatatgctttttgcccaagatatatgctctgggttgaggggttgtagtatagagatctacctgccttgtggtgtccaggaccacacttctaagttcccttaataaatcacccaataccaacaaactggatttgtctacctcctcctttggtttctcatcttcttcagcatttgggggtctctttgtgtatacaaccctttcacagaacagctggtgatacagggggtttgagggagccagcactggctttagagacacaactcctaggtgaaaatcctagccccattactggccacataagcttgaatgagtcatgaaagatctcataggctcagtcttcacatctgagaagtgcctgacagtgttattacaagagctgaatgaaggacgggaatgaatatggaagctctttgtaagcaaggaggtgttatacaaatgtctttttttacccccctacatgcacgtagtcggtacaacacttttctgattggtcttgtcaaagaggatctcttttccagtctggagctagaaaatagttatctacatttgttacattaaaactcccttctgagagactccctttctctgctggctgccaaggagctcagacctgaacttgggactcacctgcatcaaagttgtagatcacgctggcatttccttctactcttttccaagactcactttcccagactccgaaaaaaaaaaaaaaaaaaaaaaaaagcactggccatttttctttttttccctttttttgagatggagtcactctctgtcacctagactggagtgcagtgccatgatcccggctcactgcaacctctgccacctgggttcaagagattctcgtgttctcgtgccttagcctcccaagtagctgggattacaggtgtgtgcaatcaccccgggctaatttttgtatttttagtagagatggggtttcactatgttgcccaggctggtctcaaactcctggcctcaagtgatccacttgcctcagtttcccaaagtgctgggattacacacatgagacaccgcacccggccccattttgcatgcattttgcacgccatatttaaagattcttgccggtcgtggtggctcacacccgtaatcctagcactttgggaggccgagacaggacgattgcttgagcttaggagttcaaggccagcctgggcaacagagtgagacctcctctctacaaattattattattattttttaattagccaggtgcggtcgtgggtgcctgtagtcctagctactcggatggctgaggtgggagaatcatttgagcgctggaggtcgaggctatgagctatgattacactattgcactccaggctgggtgacagtttcaaaaaataaattcttgtatttgtggcagctgggtcattagaatacaatataatcatgcgtgagaggagccatgggaaacactgagcctggcttatgaaaaaggtcctgcaaatctaatttcatctgaagttcaacagactctttcttccaggcacacaggcgttatgtggccgcacgggtccctgcccgttagaaggattcagccacaccccagctttccagttcctggggtcttttgccaggacagtaggtgtggagtgcgtggtgaagtggagggtggaggtgggaccaaggccgaatttagggacccccagcatgagctgcgggtgggtcaaggccgcgaggttggagggcacggggacacagcatagcgaggaaggaacggtagggaccgtggtgatagactaggggtggacgcggggattgtgtttttctttaagcgggagagagaagcccgatcaccggcagcggaggagaaaagtccagggtagagatgggggcgctggtgtgggggcggtcaggagagaagggcgggggccgtcccaagcgtcctgcacctgccctactcgccgagaatttgcccgggtcggtgccagggcggggcagtcggcggcctggctgctaggctccgtgacatccggcagtctgagggcggcgggattcgggatgacttcgggcgggtgagtgtccccggggcagagcagagcgagaggtgaaacttcgggagcagggagcgccgcgggtcctttctggcgtctgcagagcgggcaggtgctggggacgcagacgccggagccagggagcgggcggttggagtcttaagtccaaccggttccccgcataggtggctgcagaggcgaggtgacggcgcgtgcggaacgaactctgcacccccaggaatggggagcgctggcttttccgtgggaaaattccacgtggaagtggcctctcgcggccgggaatgtgtctcggggacgcccgagtgtgggaatcggctcgggagtgcgggcttcggggctctctgcttggaactcagaggcgctgacccagcctggggcccgtttgctgcccacgggaggagccgccgtcaggggtatgtgagtgcccgggcgcggggactgcgggctgtggacagtcggggagcccggcggcttggtctcctccacagtccgcgcggagtcagggaaaagtcggttttcaaatccaggcgcccaccgcagggcagagtgagctgcggttgtgtggccccgcgtgctaaagagcctctacggagtgatataataattaacggggtaaagtacatttgaaagtctaaattaatttttataagctacgaagaaggatcagacatacatttggtattcttttatccgcaaagtttattttgtttgtattttccaaaactctaaaacaatcgctaaacattgacaaagaagtcatctcacaaaaatgcaataacatgtttgtgacatgacatcttgtaagcatgaaaaagaacacgtttggccgggcgcagtggctctcatctgtaatcccagcactttgggaggccgaggtgggcggatcacttgaggtcaggagttcaagaccagcctggccaacatggtgaaaccccgtctctactaaaaatacaaaaattagccgggtgtggtggcaagtgcctgtaatcccagctacttgggaggccgaagcaggagaatgacttgaacctggaagcagaggttgcagtgagccgagattgctccattgcactccagcctgggcgacagagggagactctgtctcaaaaacaaacaaacaaacaaaacaaacaaacaaacaaacaaaaagcagcaacacacgttgaatagaggattggcggaatgggggaaaggaaggcggctttgcatccatccacgtccttggctaaggctttcattccagcgttccccttccccaacttcccccactccacaatccttcatgggtgactgaaaaggaggaagctgggaggcctgatactgatgcggataaatttaaagctggcaaatcctcggcaaatttgacttttcctccacctgtggaatcatgcataaaaggtctgcagtttctttttaattgacaaataataatcgtacatattcatgaggtacatagtgatattttgatacatgtagtgataaacacataccatagtgataagatcaggataattagcatatacgtcttctcaaacgtttatcatttctttgtgttgggagcaaacattcaatatcttcctcctagctatttgaaactatattattatcattattttgagatgcagtcttgctccatcacccaggctggagtgcagtgatgcgatctcggctcactgcaatctttccctcccgagctcaagtgattcttccacctcagcctcccgaatagctgggattacaggcgtgcgcacgcgcgccaccatgcccaactaatttttgttattttattttattttttttagacagagtctagctctgtggcccaggctggagtgcagtggcgcaatctcggctcactgcaacctccacctccatggttcaagcaattcccctgcctcagcctccagagtagccgaaattacaggcgcacgccaccacgccctgctaatttcttttgtatttttagtagagacagggtctcatcatgttggccaagctagtcccgaactcctgacctcaaatgatccacccgcctcagcctcccaaagtgctgggagtacagacatgagccacagtgcccagcctgatactatatattattgtaactatgttcatcctacaatgttacaaaacactgaaaggcatttctgctatctagctgaaactgtgtaaccatgcccttggacttcctagtgttcaggaccgtgagccaaataaatttttctgtataaattactctgtggtatacctgtggtattttgtaatggcagcacaaaatggattaagacagtttctataactcgaatagtttaaatgtatttatttttctgggtaccattttagaaaatttagaagttaagatgttacagaaatatgtgacaaagatagtgcaaactcaaattacacatacacacacagagtatttctgagcttcggtttgttccattcacttatttgcttattcctgaattggtaacatgcttttaataactgtggccttatcataactttgctctttagtagtaatatagctatccttcttttttttttttttgacggagtttcactttgcaacctccgcctcccaggttcaagcgattctcctgcctctacaggtgcgtgccaccatgcccgcctaagatggagtttcaccatgttagctaggatggtcttgatctcctgatctcatgatccacccgcctcggcctcccaaagtgctgggattacaggcgtgagccaccgcgcccggcccatccttcttatttttaatatcttccttgctattcttatgtgttacttctaataaattttagagtcattttgaccaataaaaaatctgttctgttagcctctgtggtgtgtgcctatagtcccagctactcagaaagctgaggcaggaggattacctgagcccaggagtttgggaccagccagggcaacatagtgagagcctggctctaaaaaaggaaaatcctggcccggcatggtggctcacgcctgtaatcccagcattttgggaggccgaggcgggcggatcacgaggtcagaagatctagaccatcctggctaacacggcgaaactccgtctctactaaaaatacaaaaataaaataaaataaaataaaaattagccaggtgtggaggtgcgtgcctgtagtcccagctacttgggaggctgaggcaggagaatggcgtgaacctgggaggtggagctcgcagtgagctgagatcacgccactgcactccagcctgggcaacagagcgagactctggatcaaaaaaaaaaaaaaagaaaatcctgttttgcttttattcatgtggttattatattaaatttataaattactatagagcaaagttacatctctacaaaattgagctattctagtcaagaataaaaagaaggtatctcaatctattcatatatatatttccctaatacagtggtaatttgcttaattctttatttgttcagtgacaaaattaattcttgatcattactaaaaaagaaagaaaaaagagactatagaaacatgttcatttaatagtgcagatcacaattaagaacttgatgtgtgtcatttcaggcatacaatcgaataaagttttaattttttaagggcgcagattttatattttatgtatattcagtaatttgatttttttaaaaggtgcctttatttacttagatgtttaagctctcacattagagtttatttatttatttatttatttatttatttatttatttatttttgagatggagtttccctcttgtcacccaggctggagcacagtggcgcgatctcagcccactgcaacctccacctcctgggttcaagtgattcttatatctcagccttccaagtagctgggattacaggtgcctgccactacactcagctaatttttgtatttttagtggagacggggtttcaccatgttggccaggctggtctcgaattcctgacctcaggtgatctgcctgtctcggcctcccaaagtgctgggattacaggcgtgaaccaccgggcccagcctcacattagagttttacaagctggtgaacacttggcaaattgtttctcccagagaactacaagcatacattcttacacattaaactaatatcaatacacatcacaattttatcaattacatagtaaaacaaattatcaagtatacaaatattaagttacacagcttaaaaggcatgtaatatatcagatgtctgctcagttcattaccagaaacccacttttttttttccccaaagagagattgacaagaaaaggaaaaaattcacacttaaacaaaataactgtaaacaacttccaataggtattttaaaaattacaagctgttcagaaattttatgattaaaaattgctttagttatataatatggtttgaatgtgcccctcagagttcatgtgttggaaacttcatccccaattagacaatgttaagaaatggggccttataagaggtgatgaggccggaagggctctgcgctcatgaatggattaatgccattatcatgggagtgggttcgttatagtaggagtggattcctcataaaaggacaaattcagccccctcttgctgtgtctctcacatgcactcacttgtttttccaccttccaccatgggatgatgcagcaagaaggtccccagatgtggcccctggatcttggatttgccagcctccagaacataaacttctgttccctgtaaattacccagtctcaggtattctgttatagcagcacaaaaccgtacaaaccagaccaaggcagtgtgataacagagcattgtttccttttaaaatgtatttactaaattaaaatgtatgttctacatattctgcacaagaaaaaaacacattttaccaaaaatatttaattgttccctcccattctttttcagaacttaacagggaggcccctgttaagttacccactaaaatttaagcattcgatgaaatgtaatgtctggagatattaaagacatgtgcttccatacagtgtagattttcaaaatgaaaatccataacagcacaagatgagacttagaggaagatgttaaatgatcactgtgagacctgattaaaatccaacaaaaatcagtggttgcacaaacctgatgtatattggtacaaatgcagtagatataaacataaagtgagcaggcaaataatcagataggccccactttcaatgtttgaaatgacaggaggaataaaccatgtaaggtctagagtgttcctagttccggggattttagttctgtgtgatactaaaaatatacaagtattgggcaggccatttaggcacttaatctctctaaatttcctatatattaataagattctagcatggcaatagacttaaagatttataactcaagactgcatgatttcaggaaatgtcggttggtaccaaccataggcacatcttaaatgctaaaaaccaagaatcttttgctaagcgcccaagagatcaagatcatatgggccacctaagagtctgccacataagtcccacatgtttcttcttaagtatctgcctgcctgggtcattttgtgttatgttgttaatttgaagcagatttctgctttcattatgttttctgacttgttggcttatagaaacctttgtagggtagtggttaaaagtgtggtctgcttttgaattctgcatctgtcataaccgagaaagcaggttacttttcctatttagcttcagctatctcatctgatcattgcgtggagtaatcaaacttctctcagccagccttggtggctcatgcgtgtaatcccatcagtttgggaggccgaggcaggcagatcacctgaggtcagtatttgagaccagcctggccaacatggtgaaaccccgtctccactaaaaatacaaagaatagccgggtgtggtggtgggcgcctgtaatcccagctattcaggaggctgaggcaggagaatcatttgaacccaggaggtggaggttgcagtgagctgagattgtgccactgcactccagcctgggtgacaaagcgagactctgtctcaaacaaaacaaaacaaacaacaacaaaagaaaaacaaaaaataaaacttctcttgttatgctgttgtgaggattaaatgagataatgcacacaaagctcttggcagggggtctagaacatactaagtggtcattagacaattattattattaatttttttactatattttgtcaccaggtaccctattaaaatcttactaatagcttctcacctcatacattttagttttctgaatatgtaatcatttcacctgtaaataatactttttatttcccttttcgttatttatgttttattctataagctaatcttactgcattgattagcacttccatgacaatgttagataatagcagtgggcgtttttgttttttttttggagacagagtctccctctgacaccgaggctggagtgcagtggtgcagttttgactcactatatccttcgccctccgggctcaagtgatcgtcccacctcagcctcccaagtagctgggaccacaggcctgggccaccatgcccagctattttttttttcagtagagacattcaccatgttgctggtctcaaactcctgagctcaagcgatccgcctgcctcggccccccaaagtgctgggattacaggcgtgagacaccatgcccagcctattatgtttttagagatggggtctcagttgcccaggctgtaatgcagtagtgcgatcatagctcactacagccttgaactcctgggctcaagggattctcctgacttagcctcctcagtagttaggactataggcacatgccacggtgcttggctatttttcaattttttgtagatacagggtcttgttttgttgcccaggacggtcctgaactcctggcttcaagtgatcctcctgcctaggtctcccaaagtgctcagattatgggcatgagccactatgcccggcgaggttacatttgaattgcattgtcagaacgtatgatctgaacgatttctactttattacagttttctttgtgtcctaatacgtggccaacttttttttttttgagacagagtctcaaattaccactgtattagggaaatatatatgaatagattgagataccttctttttattcttgactagaatagctcaattttgtagagatgtaactttgccctatattaatttataaatataatataatataatttataataaccacgtgaataaaagcaaaacaggattttctttcttttttttttttgagacagaatctctctctcttgcccaggctggagtgcagtggcgtgatctcagctcactgcgacctccgcctcccaggttcacaccattctcctgcctcagcctcccgagtagctgggactacaggcgtccgccacaacacccgactaattttttgtatttttagtagagatggggtttcaccatgttagccaggatggtctcgatctcctgacctcgtgatccacccgccttggcctcccgaagtgctgggattacaggcatgagccaccacacccggcatatgtggccaatttttataaatgttttaagagctctttaacagaatacaaattatatcattttgttgttctgctgctttaaaatatttttgagacttgatcaagtgagacatgtcagcatctctaactatctttgtatttctaatccttctttcatatcctgccattttttactttgtatactttaatgctattattagtggataaaagttcacggctatctgttttggtatcatgcattgatcactataagtggtctttctgtcctatttaatactcttttttattgccttgaatttagctatgctgacattaacattactaacctttttttttttttttgaggagtctcgctctgtcgccaggctggagtgcagtggcgtgatcttggctcactgcaacctccgcctcccgggttcaagcgattctcctgtctcagcctcccaagtagctggcactacaggcacacgccaccatgcccagctaatttttgtatttttagtagaggctgggtttcaccatgttggccaggatggtcttgatttcttgaccgcgtgatccgcctgcctcggcctcccaaaatgctgggattacaggtgtgagccaccgtgcccagcctctaacctttttttttttctggatttttttgccatccttttatttgtaatttttctaagtccctttgttgcaacttgattctttcctcctctgtttatcagaaatcgattttagtgaccaatataagctatgtgcttagcttacatttttcctgaaattatcagtctcatatacattacataatcaagaaaaaagattttaacataatctgttcttttgtgtcccaacagctcgagatttctgtggctcctcaagatattggtcataatcctggtacttggcattgttggatttatgttcggaagcatgttccttcaagcagtgttcagcagccccaagccagaactcccaagtcctgccccgggtgtccagaagctgaagcttctgcctgaggaacgtctcaggaacctcttttcctacgatggaatctggtgagagactgcgtgttctttctttcaccttaatgcacacatcttccttgctcctcctcaagtaccatgccctactgtgcccattgtacagatggttcccttgctttcctaagcctgtgctgaatgcacaagtgactgcaagccaggatggggcttggtctgtacgatccagtctatgttctctatagcatccagcaaaatcccttaaaactttcgagagcatgtagtttttttttatcaaaactgcagaaaagatgctgcttctctgtctctctgccctccttttatggtggggtgagatacaactgacagtcacgtggctctcagatttaaagaagttaggtgcaggggacaattcaagagaggaaaagtcttcagccttcctctgtccctgcttccctccctttgtccccttgtctctgtgaggggccagtgcaggggactccagggtctcatcatctcagaacagttgggtgtaggaaagaagattttcagggtaaactacacactggattaggactccggtttcctctcacccaccagcctacccacccaatccatgtttacagtcctcttgcttgtttcaggctgttcccgaaaaatcagtgcaaatgtgaagccaacaaagagcagggaggttacaactttcaggatgcctatggccagagcgacctcccagcggtgaaagcgaggagacaggctgaatttgaacactttcagaggaggtaatgcgggtcatgaaggcccttgggttctgagatggaacaaaagccctccctatgtcctgaggttgtgaatcttaagagaaaaagcaggaaggaattctctctcttgcaagggtccctgggaggaactattaggaatgaaacaaagaaggaatcgaggaaatcatccttaaatgaagatttacaaaactttgtatgtacaaaacatttcataacaacaacaacaacaacaaaaagctgggattggtgacacatgtctgtcattctagcactttgggaggtcaagatgggaggatagcttgagcccaggagtttgagaccagcttgggcaatatagtgagacccccatctctacaaaacatttttaaaattagccaggcatgatggtacatgcctgtagtcccagctactcagtaggctgaagtgagaggatcacttgagcccaggaagttgaagctgcaatgagccaggatcacaccactgcactccagcttgggcaacagattgaaactgtgtctccaacaaaagcaaaaacaaaaacaaaaacaaaaacaaaaaaaacaaaaggaatggagatagtttgaaacatctggtggtacatcctccatgcacccaggccatcatagcaggtgattttgtagtcatcaccaaggtgccctattttattcatttatatgttgagagcatactaccctgtgctatatgcaaggagtgtatccctttgttttaaattacaaggggtgtcaacactcaggtgtatcaaccagggttgttggttgaaaaaggcagaatttggctgggcgcggtggctcacgcctgtaatcccaacactttgggagactgaggtgggcggatcacttgaggtcaggagttcgagaccagcctggccaacatggtgaaaccccatctctactaaaaatacaaaaattagctaggcatggtgacgcacgcttgtaatcccagctacttgggaggctgaggcaggagaatcacttgaacccaggaggtggaggttgtagtgagctgagattgtgccactgccctccaacctgagcaacagagcaagactccatctcaaaaaaaagaaaagagaaaaaacaaacaaacaaacaacaacaacaacaaaaacaaaaaaacaaaaaacaagaaaagggctgaacttgattctgcctggcttgtatcaaaagggaacttgttagaaggatgctggggccttaccaaatccataggtggtaggatgtccaggctaggaaatcaggtaagaactaacggagcactgaagaactggtcaggctccagggccatctggtccccatattgttgttgcttctgcaatgaactgtccccaggttactgccttagtgctcaattaactgagcctaactcatgaatcaaaaggaagggaaagggtgcatcagacccctccaggtttgacttttgaagctagccactgtcttagtccgttttctgttactatagcagaatactgcagactgggtaatttataaagaaaaggtaagtttatttagcttacgattctggaggctgagaagtctaacagcacggtgctggcatctggtgaaggcttcttgctacatcataacatggtggagggtaccacatattgacagggcaagagcacatgcatcagctgaggtctctcttcctcttcttataaaactaccagtcccttggttgggcatggtggctcacgcctgtaatttcagcactttgggaggccaagacaggtgaaccacctgaggtcaggagttcgaggccagcctgggcaacatggcgaaactccatctctactaaaaatataaaaattagccaggctgtggtggtgagtgcctgtagtcccagctactcaggaggctgaggcaggagactcacttgaacctgggaggtggaggttgcagtgagctgagatcagaccgctgcactcactccagtctgggtgacagagtgagactccatctcaaaacaacaacaacaataacaaaaaccaccagtcccatcatggggtccctacctgatgaccttatcctaattacttcctaaaggcccctacctccaaacaacatatgaatttgggaattaagtttctaacacatgaaatttggggaacacattcaaaccatagtagccactaccctccaaattacatgcaagtggaaggctccccagaagacagatggaggcaccgtctccatcaggaggtgttgaaagctggacagccagtggaatacacaggtgatgctggcatggatttcaaccctggtgcacctagctatgtgaggagcaactggtcttggtagttaacagtgctgccgcgggaagctgactggctgcattcaggtcctgcatcctctatctgccagctaggtgatcttgggcaagctgcttaatctctgtaaaatgaggatgctaataacacctagctccagttgggcatggtggctcacgcctgtaataccagcactttgggaggccaagacaggcagatcacctgaggtcaggagtttgagaccagcctagccaacatggtgaaaccccatgtattagtcagggttttcttagagggacagaactaacaggggggagagagagagaaagcgagagagagaatttattaagtattaacttacatgatcacaaggtcccacaacaggctgtctgcaagctgaggagcaaagagagccagtccaagttccaaaactgaagaagctggagtccaatgttcgagggcaggaagcacccagcactggagaaagatgtaggctgggaggctaggctcatctcattgcttcacgtttttctgtctgctttatattcgatggcgtctgattagatggtgcccacccaattaagggtgggtctgccttccccagcccactgactcaaatatcagtctcctttggcaacaccctcacagacacaccctggatcaatattgcatccttcaatccaatcgaattgacatttagtattaaccagcacaagtccaccccttgtcaacttgaacccatacacatctcctgagatcatacataatcttcaaataaagacaataataaggttataattatgcctaacataatacaactatcttttgtacgaccagaaacgcaccaatccccaacccaaatactattacataaagttaacaatacttagatgctgatatgaagtcaataaatcttacgtcacatgataaaggaaaaggaaataaaatgaagatattttcttagtacaagtgtgtatatgcacaaacatgtttttaacaaaagaaagaggaaatactcatgacaattacagtcctcatttctgcagctggtcacatggtcgtagctggtattgattatcttcttttactacccattctgtattccccttgccttcagcaagcacctcagcaggtaatgttttttttcctggtggagtgacccaaaccttcattcctgaagggtctgggtcatttgtagccctgcctggattgggctattgtagtttcccattgaccttaatcacagggcatggtaatactaagagacaccctaatggatctcctgtattccatgtgcactcttccttacctccattgtggagtagtagactgattttatcttgatagcccgggtcaatcaccccagctaacacagtaacttccttcttagcctgttgacataaaggtaggaggagtccaaagtgtccaggtggcaatattaacttccactttaatggaattgttgttgtgtacactggtggcagcgttcctccctctggaactaagacctctaggccagcagaacataatgttgcgggaacaggaagcaaaaattttgctagtggatcactaggggtgatggtgagtagtgctacttcccctctttgattcctggacccgtgaatcctggccatgggagaatcagtaccatatattggacactgattcagagcatacatggccttctggagaactttgcctcagccctgcaaagtattgtcacctagttggcattataattgtgacttcaaaaggccattccaccgttctatcaatccagctgcttcaggatgatggggaacatggtaagaccagtgaattccatgagcatgaatccattgccgcacttcttcttcttcttttttttcaagatggagttttgttcttgttgcccaggctggagcgcaatggcacgatctcagctaactgcaacctccacctcccaggctcaagcaattcttctggcttagccacccgagtagttgggattaaaggtgcacgccaccactccctgttaatttttgtattttttatggagatggggtttccccatgttgccgaggctggttttgaactcctagcctcaagtgatccacccaccttggcctcccaaagtgctgggattacaggcgtgagccaccatgcctggcccaacactgtcttttcttaatttccattgctgactactccatagggatcctcaaattctagctaagccatgtgtctaaacattcctgtctgattgagggctccttaaggtgggaatgtagttttcccatcagtccaaggcctctatgagagctaaactgtcctccatcagactggaaggttcatgattacaagggctatgtctcctcccttagactggtacttctaagattgggctctctctccttccttagattagggattccctgaaggttggcactgctcttgcaggatgtcttcagctaatgaaattacatatgataaataacccagaatcatttgctccctggccaatgtcacataagctatataaatctctggagtatatacaggagatgtttcttaatttacattcttcgttacatgttggatgaggtaatctggcaaaattgcatttagagaccacatctgttatcctccggagaatgcatgactgatgtggaaggaatgacccggggatccatataggatgactaattaagaggatgtttgtgcctcttgtctgtatccttgaaattacaaatagagcttgatactggatgagatctctgactcagttgaggctgattggtcaatctgatcctgtgtgttagtgctacattatacttccattaaaaagcagcatgtgtaatgctcctctaagaaaaagttcatttttttcctcttcttttcttgttttctttttctttattcttttcttttctttctttcttttttttttttttgagacaaggtctggctctgctgcccaggctggagtgcagtggtgcaatctctacccactgcaacctccactttctgggctcaagggatcctcccacctcagcctcccaaatagctgggactacaggtgcatgctaccatgcctggctaatttttgtgtttttttgtagatatggggttttgccatgttgcccaggcttgtctcaaactcctgagctcaagcaatccagctgtctcagcctcccaaagtgctgggaatacaggcgtgagccaccatgcctggccagaaaaagtccattttaacccactcccctgaccactaccactgctattctcgtccctttcttaaatgataggttcccttgtaaacctagctaaggagtctgccattatgaatttggtatgtattattccacactatttttaaatactgttatatacatgtatgttatatatatatgtgtgtgtgtgtgtgtatatatatccatataaacatatactgttggttttttgtgtattttagtgtacttggtaccataaaaacaaatcactctgaaatttgtttttttattcaattatatatatatatatatatttcagattataagtttattcaatgcaaaataatcctctgggtgggtgtggtggctcatgccagtaatcctagcactttgggaggctgaggcaggtggatcacctgaggtcagaagcccagcctggccaacatggtgaaaccctgtctctactaaaaatacaaaaattagtcgagcgtgatggtgggcgcctgtaatcccagctacccaggaggctgaggcaggacaatcacttgaacctgggaggtggcagtggcagtgagctaagatcgtgccgctgcactccagcctgggcgacagagtgagatcctgtctcgaaaaaaaaataaaaacaaaacaaaagtcctctccaattttactgaggtggctgaccacatccacaaccaaatctgcctcttactggaatttggttgttgacacagcctcagcctcggcattcttgttggcagcaggctgtgggcttccccacttgtgggtcttgcaggtggctcaccctccagaccttcaggcagagacctgccagtctctggacagctgtggcataaggtggcaagcacaatctctgggggcagatggaggtcatcatggagatactggatacccttgttggtaaggtacgcgtagaaatgtctccaggcaaaccgttcctgcacaaagcctccggacttgagagactgcacaaccttcatgacatgaaggtcgggcaccttcttgtctgccagctccaggtgcttaggcatgtggacatccttcttggccaccgtgactccctcctttaaaaggagttcatagggctgggtgcggtagctcacacctgtaatcccggcactttgggaggccgaggcaggcggatcacgaggtcaagagatcaagaccatcctggccaacatggagaaaccccgtctctattaaaaatacaaaaattagctgggcgtggtggcatgtgcctgtagtcccagctacttgggaggctgaggcaggagaatcgtctgaacctgggcggtggaggttgcaataagccgagatcgtgccactgaattccagtctggcgacagagcgagaccttgtctcaaaaaaaaaaaaaaaggagttgataaatgcattcccgttcttcttaggcatcaacatctcggtggctgcagggtctggggccagaactggaaaggagtatgaaatgtttttaagagctatgtgtatatctagttcatccctctgaattgcaatatagctatgaatatgaatatgctgcattttactaagccacttccctattgaaaggtatttagattgttgaaaaaccttcatgtttacatttacattatttacaataatattacattatatttacattatttcctttttcattaagacatgtataagggccaggcgcggtggctcacacctgtaatcccaacactttgggaggctgaggtgggcggatcacttgaggccaggagttcgataccagcctggccaacatggtgaaaccccatctctacaaaaaaatacaaaaattagctggacatggtggtgtatgcctgtaatcccagctagtcaggaggctgaggcaggaaaatcgcttgaacccgggaggtggagtttgcagtgagccgagatcacaccactgcatcttgcctgggtgacagagtgagtgagacttcgtctcagaaaaaagaaaaatacacgtataaggatgttcatttcaaacaatgctgaaatgaacattcttgtgcttgtcttattgcttacacatgcaagcatttctcctttcacctagcatcttacttgctagatcccagggtgtgccttttttatttttgatagatattgccaaatttccctcaagagggcttgtgtgaactcacactttcatgaagagtgggtaagtgttgcaccttacatacacctaactaacgtttgctatcatcacattttcaaactttaatgaaaaaggtattccatgttttttttaattcacatttccctgattgaagctgagtatgttccatatgttcattgccatttgtatttcctcttccgttaattacctgtttatgttctttaccatttaaaaattttggaggtcggggggggtcagccccccacctggccagccgccccgtccaggaggtgaggggcgcctctgcccggccgcccctactgggaagtgaggagcccctctgtccggccagccgccccgtccgggagggaggtgggggggtcagccccccgcccggccagccgccccgtccgggagggaggtgggggggtcagccccccgcccggccagccgccccgtctgggagggaggtggggggggtcagccccccccgcctggccagcagccccgtccgggaggtgaggggcgcctctgcctggccacccctactgggaagtgaggagcccctctgcctggccaccaccccgtctgggaggtgtacccaacagctcattgagaacgggccatgatgacaatggcggttttgtggaatagaaagcggggaagggtggggaaaagattgagaaatcggatggttgccgtgtctgtgtagaaagaggtagacgtgggagacttttcattttgttctgtactaagaaaaattcttctgccttgggatcctgttgatctgtgaccttacccccaaccctgtgctctctgaaacatgtgctgtgtccactcagggttaaatggattaagggcggtgcaagatgtgctttgttaaacagatgcttgacggcagcatgctcgttaagagtcatcaccactccctaatctcaagtacccagggacacaaacactgcggaaggccgcagggtcctctgcctaggaaaaccagagacctttgttcacttgtttatccgctgaccttccctccactattgtcctgtgaacctgccaaatccccctctgcgagaaacacccaagaatgatcaattaaaaaaataataataaaaaataaaaattttgcctttttcatattaccgtaagtattcactatgatgatctaatcttttttttcaaggtaattaaatgatctcctgcttaaactgggtcccgaaggctaacatttcaaccattgtaccgtagttcctcaaaaagctaatcttaggccgggcgcggtggctcacgcctgtaatcccagcactttgggaggccgaggcgggcggatcacgaggtcaggagatcgagaccatcccggctaaaacggtgaaaccccgtctctactaaaaatacaaaaaattagccgggcgtagtggcgggcgcctgtagtcccagctacttgggaggctgaggcaggagaatggcgtgaacccgggaggcggagcttgcagtgagccgagatcccgccactgcactccagcctgggcgacagagcgagactccgtctcaaaaaaaaaaaaaaaaaaaaaaaaaaaaaaaaaaaaaaagctaatcttgctggatggtgctatgtgcttgcttttgactaaagattgttattggccgggtgtggtggctaacatttgtaatcccagcactttgggaggccaaggcatgcggatcataagatcaagagatcaagaccatcctggccaacatggtgaaaccccgtctctactaaaaatacaaaaattagccgggcatggtggtgtgtgcttgtagtcccagctactaaggaggctgaggcaggagaatcacttgaacccaggaggcagaggttgcagtgagctgagatcgcaccactgaactccagcctggcaacctagcgagactctgtcacaaaaaaaaaaaaaaaatcgttatcaacaaccaaaaaaaccataaaaatagttactctgtttcctctaaaaatattgtgacaacaattactcccatatacactttcttgtgatttagtttatttattatttcagcggtaggagaagttccacctcccttcaggaattggtctacttcttcctttggatattaaggaccatgtgatgattgtcaatcgcttttatcctggttcccacgaagttcagatgtgactttggtgtttagctgctgcagctgggtgggcccctaccgtctgataatttccttcttctatgctggtcatggttttttttaaaaaaaatatgctttgttagccaggcatggtggctctctcctatagtcctggcttctctgacagctgaggcaggaggattgcttgagcccagcggttggagaccagcctgggcaacatagtgagaccctatctctacaaaaaaattttaaaaattagctgggcttggtggcatgtacctgtagtcccagctatgaaaaggctgagatgggaggactgcctgagccagggaggtcaagactgctgcgagccgtgattgtgccactgtactccagccagggtgacaaagtgaaaccctgtctcaaaaacaaaaatgcagccaggtgcggtggctcacgcctgtaatcccagcactttgggaggccaaggcaggtggatcacttgaggtcaggagttcaagaccagcctagctaacatggtgaaaccctgtctctactaaaaatacaacaaaattagccgggcgtggaggcgcactcctataatcccagctactaggtaggctgaggcaggagaatcgcttgagcccgggaggcggagcttgcagtgagccgagatcgcactattgcactccagcctgggtgacgagaatggagggagacagggacaacccaattttgatttctccatattgtcagggcaaggctctgtgcacaggcaccactttgagaacgaaccagggaccagcatcagggcagctgctgacgtttctgttctccttcctgcagagaagggctgccccgcccactgcccctgctggtccagcccaacctcccctttgggtacccagtccacggagtggaggtgatgcccctgcacacggttcccatcccaggtaagtacatccacataccaagagaccccagacaacattctcactcttctaaggcaaaaggagggagaggtcgggtgcagtggctcatgcctgtaattccagcactttgggagtccaaagcaggagttcaagactgcagtgagctatcatcttgccaatacactccagcctgggtgacagagtgagaccccgctgtctcttaaaaaaacaacaacataaaaggggccgggtgctgtgctcacgcctgcctataatcccagcactttgggaggctgaggtgggtggactgcttgagctcaggagtttgagaccagcctgggcaatatggcaaaaccctgtctctacaaaaaatagaaaaattagctggatgtggcggtgggcaactgtagtcccaactacttgtggggttgaagcagaagggttgcttgaacctgggaggccgaggctgcagtgagcagagattgtgccactgcacttcagcctgggtgacaaagtgagatcctgtctcaaaaatagataaaaaataaataaataaaagtatggagcagacattcattggtacctgctgtgtactcagcacaaggcaagaagcttgatgtgattttttttttttttattgcgacggagtcttgctccatctctcaggctagagtgcagtagcatgatctcgggtcactgcaacctccacctcccgggttcaaatgatcctcctgcctcagcctcccaagtagctgagatgacaggcatctgccaccatgcctggctaattttttgtatttttagtagagacgggttttcaccatgttggccaggctagtctcgaattcctgacctcaagtgatctcctcacctcggcctcccaaagtgctgggactacaggcatgagccaccgcgcctggcttgatgtgatttcatttcatgttagccttattgtatccacaactgggaatctcctttagtagccatgacctcctggggctccaagataacacaggagaggacagaaatctgtgtgcctcaaagaatcttaggacataattggcttttcaatgtcctccatcatcatgggaacaggcaaaacataagccactctgtaaaaagtgcttttttttttttggggacggagtcttgctgtcacccaggttagagtgcaatggcatgatctcggctcactgcaacctcctcctcctgggttcaagccattctcctgcctcagcctcccaagtagttgggattacaagtgcccaccacacctggctaatttttgtatttttagtagagatggggtttcaccatgttggccaaactggtctcgaactcctgacctcaggtgatccacctgcgttggcctcccaaagtgctaggattacaggcatgagccactgagcctggccgggagtgcattgtgaaaagaatatttatgttggttaaaactgccctccatgatggatttttacacacccctctagttcagcatcacattcctcatcagaataaagttgaatattatcagagggaccagaaggatgagcctgcaggcacagatgtcccctcccagtgcagagatgttggattctgtgggtctgtccagtgaagtcttcttctgcttgtgggctcatggcttctggaggcaaacagccccccgaaacctgcaagccccagaaaagacctccaagtaaggtctcggtgtggtgacacctggggatctgacatatctcatggacccagccgagctctctccaggtccagcactgaggagcatgacagatacctgaatttcacaaaccacatctcaaacaggtgagatgagaatgactgcctgagacagagggggatgcaggacatcaacagatggcatgtcccacacagaaggaagggcaaggtcccagacaggggacaaaggggacagggaagcagagatgagagtttagtaagttatcaaaggccacatagagaggatgtacttgaattcaaatttgaattagtcctactatgagaacagagatagattctaaagtaaatgcatttggggtcaagcactagtgttcttgaatagccatcttaaaaactgtttttcattttggatgattcatttcttattgtgataaaatatatataatgggctgggtgcagtggctcttgcctgtaatcccaccactttgggggctgaggcggatggatcacttgaggtcaggagtttgaaaccagcctggccaacatagtgaaaccttgtctctactaaaaatacaaaaattagccaggcatggtggtacatgcctgtggtcccagtactcgtgaggagaattgcttgatcctgggaggcggagtttgcagtgagctgagatcacaccactgcactccagcctggatgacagagtgagattcagtctcaaaaaaaaaaaaaaaaaaaaaaaggactggtgcagtggctcacacctgtaatcccagcactttgggaggctgaggctgttggatcatttgaggtcaggagtttgaaaccagcctgaccaacatggtgaaaccccatctccactaaaaatcgaaaatttgtcgaatgtggtggctcacacctgtagtcccagctactcgggaggctgaggcaggagaatcacttgaacttgggaggtagaggttacagagagttgagattgcgccactgcactccagcctgagcgacagagtgagaccccatctcaaaaaaaaatgtatatatataaaatatagaaacatatatattatattaatgttatataaaaacatatatattattatttataatatataatatttaaacataaaatcaacaacttttttttgtttttgtttttgttttttgagacgcagtcttgctctgtcgcccaggctggagtgcagtgtcgagatctcggctcactgcaagctccgcctcccgggttcacgccattctcccgctcagcctcctgagtagccgggactacaggcacccgccaccatgcccggccaatttttttttgtgtgtttttagtagagacgaggtttcaccgtgttagccaggatgatctcgatctcctgacctcgtgatccgcccgcctcggcctcccaaagcactgagattacaggcttgagccaccgcgcccagccaaaattaactattttaaccattttaaagtgtatacttcagtgacatgaagtatattcatgttgttgtgcaaccatcagtcaccaccagaacttttccatcattcccaactgaaactctgtacccatccaactgaattccccactgtccctctccctggcccctggcaaccaccgttctgctttctgtctctatgggtttggctactccaggtgccttatacaagatgattcattattcatccattgcttcctccccttcagtgacagagattccctgaaggaactgaattaattcacagcctccaaaactgaggacgggcatcagaggttttagaaccgttggggtttgagaaagaccacgaaacaccacttaacagagccctggggagaggcgcacgtgtcagcaaacactctgggcgggaggtgacacttgaaggagctctcaaggatgtgcaggagtccatgaggttggcgagagcagcggggagctgcgatgtctttcatgagcagttttctttccttttccctgtgtcctccaggcctccagtttgaaggacccgatgcccccgtctatgaggtgagtccttctcccagcccctctttgcacttggtgtcctgtcctcattccctcaactgtggctgctctcagcctttgacggagcccctgtccagattcaaggtcagacatgagcccaaggagggaggggatggaagggtgtgtagaaaacttaacttctagccttgggagtggctggagttccagagaggacttcccagaccacactgaagaatgggacccactggctgctgctgcttctggtgcaagaggaagcggccactacagccatgggctctggcactgcgtggcctctgtcagggttagggctggcaggacagacggtgcttgtgccctgccttcctttccccactttatgcagctccacatcaagatcttatggtgctatatctgatcagtgggatgcaaattgtgcccagaaccctaaccaagaggaatctgggaagtgtggttttagttttcccacctttacatgttggtcagaggttggaatgggtgatgagtgagcagatcggcaaggcctccaccacctgtcaccatggagttcttgtttctctatgttgtcttctttttttgagacagggtctcactctgtcacccagtctggagtgcagtgccgcaatcatggctcactgcaggcttgacctcctgggctcaagcaatcctcccgcatcagcctgtgagtagctgggactgcaggcacgcaccaacaaacctggttaattttttttttttgagatggagtctcactctgtcacctagcctggagtgcagtggtgcaatctctgctcactgcaacctccacctcccgagttcaatcgagtctcctgcctcagcctcccaagtagctgggactacaggcatgcaccactacacccagctaattttttgtatttttagtagagacagggtttcaccatgttggccaggctggtctcgaactcctgaccttaagtgatccatcttgacctcccaaagtgctgggattacaggcatgagccaccgtgtctggcccctggttacttattttttatttttagtagagttgtggtcttgccatgttgcccaggctggttttgaactcctgcgctcaaatgatcctcccacctcggtctcccaaagcagtgggattacaggcgtgagccatcgtgcctggctatattgtcttcttcgtagtcctgctctggacctgaattccctgctgcgcgtagttccatgcttatcatctctcttccacgctggaatacaagcttcacgaaggaatttactgctgttttcccagtgcctgtaactcggtttttagaaagtgtctgttgactgactagtatcaacagtgtcgggagtgacactattcaatttcctttaatagataactgcgatgactcacagaaggcaagagaagagagtggctgtgggggtagcaatggggtggagaggagtaagccagttctagctgcattttggaggcagagctgagaggacttgccgccagatgggctgtctgtgtgcagaaaagggtagagcaaggaggacttcccttggggcctggaacaactgagtggatggaggtgccatccacaaggcagagggaatggaggtgagggtgggaggaaacaggtttttagaggaaaatcagtagttccattttgaagacaacaagtttgagttgcttgtgaaaggtcccagcagttggatctcagaaaggtgagctgagacttactacaatgtgaccccatctgcaaaagaacgggttttaaaccatggaaacagatgaaatctagcaggaaggtgtggagtaagaagggaaaagagtctaggattggagtttgagaccagcctggcaaacacggcgaaagcccgtctctactaaacatacaaaaacaaattagccacgtgtggtggctcatgcctgtaatcccagctactcaggaggctgaggcaggataattgctttaacctgggaggtggaggttgcagtgagctgagatcatgcactgcactccagcctgggtgacagagcaagactccatctcaaaaaaaaaaaaaaaaaaaaaggaatccagatcaaggtctgaaaaactccatttggagatatatagagagaggaagaggagttgtcaaagagaggtcaaaaaaggctgtgggtggaataagaagccaagaagaacggaaccctgcgagctgagagatgggaatgtttccagaaatgggtcctttcatccttggggccctaggacttgggggattgggggcgggggcgctagcacagtgactccctgcagagccagccctacactgtcaagggcaccctggtgcttctcccctcacccttatgtgctctgccctggctcctggcctgggtatgtatgtatctttccagggagatattttccaatccctgcattgagcatcattctacctcacccaccctaggtcaccctgacagcttctctggggacactgaacacccttgctgatgtcccagacagtgtggtgcagggcagaggccagaagcagctgatcatttctaccagtgaccggaagctgttgaagttcattcttcagcacgtgacatacaccagcacggggtaccagcaccagaaggtagacataggtgagagcctgtccttggagtgcaaaatgcttagggatccagaagatacctctgggccctttcaaagtcttcctccttcaggaagccttcctgttttttgtgttttgtgtgtgtttgtttgttttgttttgttttgttttttgagacggagtctcactctgtcacccaggctggagtgcagttctgtgatctctgctcactgcaacctccgcctcccaggttcaagttattctcctgcctcaacctcccaagtagctgggattacaggcacctgccaccatgcccggctaatttttgtattttgaatagagacagggtttcaccatcttggccaggctggtcttgaactcctgacctcgtgatccacctgcctcagcctcccaaagtgctgggattacaggcgtgagctacagcgtctggcctgcctgcctgcttttaagattccttccctctttcctctttctaatcccagacacataatttcataattactgtacccagtactatccccacattgccattgaccccatagagccactcgaggagagaacaaatcatgctgtgcgctttgcacctggtgagaaccattcagttcttttcccagtcctctgcagctctcaaagctgaagatttccactgcagtagaggagggagccagcctgtgcctcagcatcttgtcttgggcactaataggaaagaactgggagaactccccattccaagggctttgtctctcccctccttccctcccaccaagaaattctagggagaacaatccctgccactctcagggcagcctgagtttccttctggatgagttaaaagcacccttttctcttttgaccggatacacaggatgcattcccaggacatcaacagaaaaaaatgtaacacggttacagatgatattcatgaccactagctaaagagatagttctccctaccttcagattttcaaacattcctcttcataagattaccctgtgagataaaatagggtgggtatttttatcctggttttgcagacagataaaaaaatcagatagtaaatggtaaagtcaaacttagcccagaccctctggtttcaagcccactccaccctaacacattctcacaggggaagaaatgtgaacttaggagtcattcagcacgttgccccagggacacagcaaggcagaagcctgaatgccagagactctatggggtccttgatctcatcccaaccaggactctccccaccaaacctgtactcgcctgtcatggtggcttcccggggtggcatggagtttaatccagacatgatactccctgtgccattatcttatttctccctccagtgagtctggagtccaggtcctcagtggccaagtttccagtgaccatccgccatcctgtcatacccaagctatacgaccctggaccaggtaaggcccttgtccttggggctccgtggtggcaaccctgtgaagctattggtgaaattcagaagggatcacctctgagacggaggagaattgatcaaaatgacagctctgatatgctccctgacaagcttcgtttggaggaaaaaaactctaagacacaatcccctaaaattgcttaattatatttaacttattatgtggttgtgtgctaattttggggaaaaaagctaaaaaattataacattttagtaagtaataataataaaaagaatggtattgaatcaaattggaaatcctgatataaacccaatacatgttggaatttcactgtgtgataaagacatcttgtctggccgggcgcagtgactcatgcctgtaatctcaacactttgggaggcctaggtgggcagatcacctgaggtcaggagttcaagactagtctagccaatatggtgaaaccccatctctactaaaaatacacaaattagctgggcgtggtggcaggcacctgtaatccctgctactctggaggctgaggcaggagaatcacttgaacccaggaggtggaggtttcagtgagccaagattgcgccactgcactccagcctgggcaacagagcaagactctgtcttgaaaaaaaaaaaaagagagagacagcttgtcaaattaaaggaggacaaatgaacaaattaaaaattggcttttcaaaaaatcacgtgagataatggtgtagctatatgaaagataaaaagttggatccaagtgtgatggcctgcacctgtaatccagctcacacctctaatctcagctactcaggaggcggagatgggaggatcgcttgagcctgggaggtcaaagctgcagtgagccaggatcaccactatactccagcctgtgcaacagagcaagaccctgtctcaaaaaaaattaacaatgaaaaataacttttaaattagaagtaaaacttgaatatatgccacagttcataccaagataaattcaaattgatcagatatctaaatacattttaaagtactagaaaaaaaacctgtagttaatttttaattagctgggtatggtggcatgcacctgtaatcccagctactggggaggctgaggcaggagtatcatttgaaccctgaaggcggaggttgcagtgagccgagatcctgccactgcactccagcctgagcaacagggcaagactccgtctcaaaaacaaaaaaacaaaaaaacttgtagtttcaaaaaacattcttagggtataaggcatgacacaaaactcagagaccataaagaaaaaattaaaaatataaaatatataaaattttatatattaaaattagcaaatttttttctttttgagacggagtcttgctctgttgcccaggctggagtgcagtggcacgatctccgctcactgcaagctccacctcccgggctcacaccattctcctgcgtcagcctcccaagtagctgggactacaggcgcccgccaccatgcccggctaatcaaattagcaaattttaataagtaaagtcaaataacaaaggacaaattgggaaaaaaatcttcgattcacattaaagacaaaggtctaattttacttaagagcatctatgactcaataagaaaagaacacccaataatggaaaaatgcacagttcagaaaaaattaaattcagtaacacttttagccattaaaatatatgcccactctcacactgagaaaagtgcatatgaaaactactttcacatcaaaaggttttggacagggctggaaaaacagcatatcaactgtggttaggaatgtaaattggcacctctcgggaggcaatttggcagttcctatcaacattttaaatgtgtatatcctttaggccagcaattccacttctagaaattatcctacagatatttatatctgtgtgaaatgacatttgttcgattgcagcgctgtttgcaatgacaaaaaacagaatgggctgggctcagtggctcacacctgtaatcccagcactttgggaggccgaggtgagcagatcacttgaggtcaggagttcaagatcagcctggccaacatggtgaaaacccatctctactaaaaatccaaaaaatccaaaatcaggcatggtggtgcacgtctgtagtccctgctacttgggaggctgaggcaggagaatcgcttgaacctgggaggtggaggttgcagtgagccgagatcatgccattgcactccagtctgggtgacagagccagaaactgtctcaaaaaaaaaaaaaaaaaaaaaaagggcaagagggtggcacagggggagggttctggaacaacttctgtccaaacgacttctgatttttgtcattctgggaaagtggctctgtgcactcacccacaaacaggtagggttgtggcttccagcatgcattaactccagctggccccatgccatgcagacatggcaactgcacagtcagatgccagttctccgtttagtggctgaatcccaaacacatctgcagctccagttgtggcatcacggggtcttttccttaggaaagctgtcccctctccagtctcttatacgtcacatgccttaagatggacaattctgtccaggccttgtgatctccaagtatttggagacatttctaaccatgtcttcctgaggatagagatcaggtaagcttttctctaggagttgcagatgatggtagaagcaagtctcaagatttgtagatattttctcctcttcctgggcttcatgaccctccatattgaacccttagatgggcaaagctctgtgcatttcaactcctaatattaagatgaaggccagaagcagtggctcatgcccataatcccagcactttaggaggccgaggcaggtggatcacctgaggtcaggagtttgagaccagcctggccaacatagtgaaaccccatctctactaaaaatacaaaaattagctgggtgtgatggtgcatgcctataatcccagctacttgggaggctgaggcaggagaatcacttgaacctgggaggcggaggttgcagtgagccgacattgcaccattgcactccagcctgggcaacagaggcaaaactccgtatcaaaaaaaaaaaaaaaaaaaaaaggaagaaagcaggacataagcaaagtgctaacaggcaggaggtgtaaaatgaagcattcagacagacagttgggaaatgacatagtggagccaacagaaccaggaaatgcaacaaattgggtatgttgtaaatgtctttattttctaatgcaactaacaaactcttattaagcacctcctgggtacaagaggcatgagacccacagacactgacaggttatggcagaaagaagccatcagatcaaagcaggaaaagacagtgaagcttcctacaggacagagctctgacacccactgttttctgcccagagaggaagctcagaaacctggttaccattgctaccaagactttcctccgcccccacaagctcatgatcatgctccggagtattcgagagtattacccagacttgaccgtaatagtggctgatgacagccagaagcccctggaaattaaagacaatcacgtggagtattacactatgccctttgggaaggtatgtccctctcagattgggtggcacctgcattccaggacaagagggccccagggtcaggttctaccctggatggggccgcttcctcaagggtcttcccaagaaagcagagtccaggagtgggagtgggtgagggctgtcctctgagtcccattgctgattcacagagaaattggtcaccctcacttctctgcattcatgaggtggttattccacctttcctcatttttttttttttttttttgagatggagtcttgctctgtcgctcaggctggagtgccgtggcatgatctcagctcactgcaacctccacctcctgggttcaagtgattctcctgccttagcctcctgagtaggtgggattaccagcatgcaccaccacacccggctattttttgtatttttagtagaggcagggttcaccgtgttgggcaggttggtctcaaactcttgtccttaggtgatccgcctatcttggcctcccaaagtttacagatgtgagccatcacacccagcctctcatttctatttttttatttttcattttttttgagatggagtcttgctctgtcacctaggctggagtgcagtggtgcaatcacagtgatcatggcagcctcaaccttaaaggctcaagtgattctctcacctctgcctccctagtagctgggactacaggcatgcaccataatgccaggctaattttttaaatttttttgtagagatggggtctcactgtgttggccaggttggtctcgaactcctgggctcaagagatcctttcacctaggcttcccaaagtgctgggattacaggcgtgagccactgtacactgctcccatctttcctcatttccgatgtggaaatcgattggggtccttataagcgacttgaggtctctgacatctcaaagattcctgacatgtagagaaatctgtcatctccatgattctaccagagctagggtcttggtctctctctcctctttccctctctccctctttctccttgactctctctccctccccactctctctttctctctccttctccctctcttcttcccaccttccctctctcccctacctttcttcctctccactctctctttctctcttcttcccaccctccctctctcccccacctctctctctcctcccacctctctctcactccccactctctctttctctccctctcttcttcccaccctccctcttccccccactgtctctctcactccccactctctccttctctctccctctcttcttcccaccctccttctctcccctcacctttctctctccctccccactctctctttctctctccctctcttcttcccacccttcctctctctttccccccacctctctctctccttgctactctttccctctctcattttcttcctccctctctctcccccttccttcctccaaggacaaaggaggaaacgaatattatacataccagatgtccttcaaacttgacatcttacaggagacaaaaggagagccatagaaactgtcaggtgaaaagggacttcagccaatttatataggccacagagccaaggaatgactttctagcctttctttgtctcagtctttgatccacacagtcactgtcccttccagactttctctgagacatggacttccttcaaccctgtggttcacagccttggctgcacactggattcgctcgcaccaattctaatggaatttgtctggagtgcatgcagcctggctgttgggaatttagaaagctccccaggtgattctaatatgtaatatgggcaaccactcctttaacctcatttcatctacagggttggtttgctggtaggaacctggccatatctcaggtcaccaccaaatacgttctctgggtggacgatgattttctcttcaacgaggagaccaagattgaggtgctggtggatgtcctggagaaaacagaactggacgtggtaagggacagttgccagtttcacccagccacaatctgtagagatggagaagaggggagaagagagcgggaagaaatatataagagaagaggagggggagggaggggagggaggggagggagaggggctggtgcaggaggtgaataggccagtgcaacccaggtggagagtgctgcaccagctcacgcctccatactgacttttctttgagtaaattacacctcctccctcatttgcaattgttttcttttaaaattgtgtgtttatgcagcatttctaactccctccgttgactagtatgagattaaagacaggagcattctggttctatcacacaacattaaaaacagtataaatggtacaaagctttaaaagcacacacggcactaatgacattctaaaaaagaataagaagagaataataaaaacagcctaggtgtgatggcttacacctgtagtcccagcactttgggaggctgaagcaggaggatcgcttgagcccaggagttcaagaccagcctgggcaacatggcaaaacctcatctgtataaagaaatacaaaaaattagccagggatggtggtgtgcatctgtagtccaagctactcaggaggctgaggtgggaggatcacctgagcccaggaggtcaaggatgcagtgagctgagattatgtcactgcactccagcctggacgacagagtgacacctgtctcaaaaaaagaaaataataaaaacatcaaaagtaaattcactgtagaaaagaaaaaggggcatggatgagaaggtaagtggtgtcgtgatcacagttaactctactgcaagtggacaatccccaaaacacctagatcagcaaagacatctcttggcaactcttacagagaccagatcacgataacttaagagagaagatgttccagctcatgtaacaaccacactggcagctgagttggctccaggattatcctggatcagcttctttttcttgttgctcctcaatcctttggtccctggctgcatggccaggaggaagaggggaagaggaagtgaagggagagcaggtttcttttaaggatgtgatgtaaacgtttctcgcatcggttctaaatcataccccttcagccaaaactttgtcacacagtgaaacgttgctgcaagggaggtggggaaatgcaatcttttttttctttaaataataaatgggctttgttttttatttttatagattgagggggcccaagtgcagatagcttatacacatgtattacgtagtggtgaagtctgggcttttagtgtacccattacctgcataacgaacattgtaccccacaggtaatttttcaaccctcacctactctttttttttttttttttttgagacagagtctcgctctgtcacttaggctggagtgcagtggcgcaatcctggctcactgcagcctctgtctcccaggttcaagggattctcttgcctcagcctcctgagtaactgggaccataggcacatgccaccatgcccggctgatttttgtatttttagtagagacagggtctcaccatattggccaggctgctctcgaactcctgacctcaggtgatccacccacctcagcctcccaaagtgctgggattactggtgtgagccaccacgcccagcctaaccctcaaccactcttaacctcctaccttttgtattctccagtgtctattattccacaccgtatgcctgcatgtacccattgtttagctcccagaaatgcagtctttagctgactagttgactatgtcgtgaaactcagaagggtcatttattaaaaggaagagggaaagaacgggtgatgggggacaatgagcagactttaccacatcacccttagaggattatgattctttcagaaatagatgtacttgctcatctgttgtgctcaggctcaaacatgaaaatgcacatctcttccatgagtgcatggataggcagctccaagaggtaagccaggagcagaaaatactaggaagacagctcgagacaaacagctccctgcaagaaatctagcaagtggaaactccgcaaatggaccagtgcacacaggctgcctcttacctgtactgcagtactcctctcccagtggaagggagtgagttatcttcttctggaaagataaccttctttggtcttgggtaagggttactcatgccaaggagattttctggggtaggcaggaaatgaaagagcccagggacccaacagtggtatagtgaaagccatggccacagcagcaacgagggagtaactgagggataatttgaaggatagacagagaaataacaattcttgttataaccgaggtgcagtccagcgagtcttcctggaagaggcaggatgaatattgatctgcactctaacatggatttctctgcctgctggctaggtaggcggcagtgtgctgggaaatgtgttccagtttaagttgttgctggaacagagtgagaatggggcctgccttcacaagaggatgggatttttccaacccctggatggcttccccagctgcgtggtgaccagtggcgtggtcaacttcttcctggcccacacggagcgactccaaagagttggctttgatccccgcctgcaacgagtggctcactcaggtgggaaggctgaaagagtgagggagggagctgggctgggaattagctgcagaagtttgttctttccaagggctgtacccggctggctgatcatagtcgcttgcccagtagcagtacatccctttcccctttcccctttctccccagactagggagctcttgatctctcttacctccctcctcacgtctctttgacttctgtgtctcctgtaggctgcccttcttttccttccccttcctttccctacagctctgtcttcttcctcctttcccatgctgcttcatattctattttttcagaaatcctttcctattaactgctctctctttccctcttactccatcagccctggagtccgcagttctgtccagtttgaaagccaatctgtgccactctgcctctgtgcccatatctctgcctgagaaatgagcttatttatttccttccaactcatcagcagggacaggctcctagagttaagggtgtggcttcacgtggggctgaacctccccagtgtatgaactgtgtcctctccctgggactctcccccaccagacctagaatagtgcccacttttctgaccgcagctcccacttccttctgctctccctctctttgcagaattcttcattgatgggctagggaccctactcgtggggtcatgcccagaagtgattataggtcaccagtctcggtctccagtggtggactcagaactggctgccctagagaagacctacaatacataccggtccaacaccctcacccgggtccagttcaagctggccctccactacttcaagaaccatctccaatgtgccgcataaaggtgtgagggcataggagaaacactaggctggctggttatggtatctatagcaggccaccaaaaactggactcctgataggtgaacgttgtaccaaaccagctggtgggtagggaaaagggaaatggctcagttactggaagtaccaatcaaaggtgaagggtcactggaaatgaaccagtcactgaccagggcaatggagactgtattaatagcaatgatgatttgtacaatgccctgccttttttgaagcatttgcatgggcagtatctcacatcatctcatctgatatcacacaaagatgacattggttggtgtcctcagtcaaaagaacagctgcctggtccttgatagttgtttggtggaaattctgtcacagtcagaagcatcggatccagcatcactgtcatccctatatttttattaggttctatcttgtagactcaaaaaatgtgaacattccagggtccttgccttgaggaggtttgcagcctggttcagttcagtccaatcacagaattaggcagccggggtcagaggatcagagaagggaaggggtcaccaggtcccaggtggtggaggaagactccgtggagtgaacttgttaggagcctgaaagcagacattcaggcatcagagagggtaggagggccctggggccatcccactgtccaccagaacaaaggctgccctggcatcagactcactccagacctgttccagaatgccagggattgaactcagagcccatgccaaggcatgatggtgaacagacagtgtgagtgtggtgacaagccactaaactccagggacctgaggccagttgctggtcactcaaaactcatgtcatttacagagtggttccatcactctgttgttggataagcctctttctgttgcctgggggttggcagattgccgagaccagcttggtcatggagaccctaacccagtggtgctagaggaattaaagacacacacatagaaatatagagtgtggagtgggaaatcaggggactcacagacttcagagctgagagccctgaacggagtttgacccacatatttattgacagcaagccagtgataagcattgtttctatagattatagataaactaaaagtattccttacaggaaacaaagggatgggccgaaacaaagggatgggctctggctagttatctgcagcaggaacatgtccttaaagcacagatagctcatactattatttgtggcttaggaatgctttaagcggttttccaccctgggtgggccaggtgttccttgcccttattctgataaacccacaaccttcagtttgggcatcatggccatcatgaacatgtcacagtactgcagagattttgtttatggccagttttggggccagtttatggccagatttgggggcctgttcccaacacgttcccctttttgttttccaaagtgataaaagcaaaggcagctttgtcatggtgagctaattctcacaggagtcaggatccgcacctgcagactatacaaagacaaacaacacagattaaaagcacaatcatcattgaaatcacagagcttccaagtgtctttatccactttaatgggttaatatctgctaatctgtctgcagctccttcaagcactccagttcctggcattaaggtcaagtgtgcctgggatgctttaaatatttgttcttttaattttgcaatatgcaaagacaagtttgtagagtgtccttctagatgcttttttattctttcccaaattttgatcttattaacagacattaatagtttccacaaatccttatgtttagcttctacagtggaccatatcatttgaggttgaggtgccactataccgccacgtttccagataatgggaactcttgctgtatttcttaccatttctaccatctgactgttttgtttagaccagctgaacatagtgtggctgtggcacacagactgagaggtgtaatttaagctaaacatccccttaggggaccaatcaataatgattccataggaatcgttgtgcagcacctctacctgttctgcaatgcaatcttcccaaacaagtacattcattatttctggccaggtctaattctatttacaaataggttttgagctgcctttgctttgcctcaattataggagcagatttattatggtaaatattaagagcagaaagcatgtgtaactgtgtcacacagtgattacatccaggcattattgccagccaagattgataaatatgcccaataagtataactgttctctgtgttgttccttgttgaaggaatactcatggcaatggtgatcaccactatcatatctatcattaaattactcattgtgactggttgtcccactttcctcaggttttcttccaccatctgtgacagcttcttgatctgtccccaggtaggtggctgtgttcgacagctgttgctcatgatagttggggtcctcctcagcatcagtcttgacatggctgcaaccaggggatcctcgggatcctcctggaatctcttcctcagcatctggctcgtggcaaggtttcaggtgtcttgatggcacccaaattggctattgattcggtcctggagaaacacaagcataacctctaccccaagttattattttacctatttcccaactttttgttattgtatctctccaccaaaccagttgttctgcttctgtctttgcagctggtttctgtagatgctgttcagctgctggcctttaagcaggctcaaaaaatttaaagtcaataatgctagaatcaattgcatatggggtgtcccgtagtccctgcttctccccttttgcttttgcaactgctgtttcagggagagattcattctttctactatggcttgtccttgagaattatatgggatgccagtaatgtgtttaatattccatatagagaaaaatgtagctagagcttggctagtacagcctggggcattatctgttttaatagaagctggaatgcccatcaccgcaaaacactgcaaaaggtgacgtttaacacaggcagaagactctcctgattggcatgtagcccagacaaagtgagaaaaggtgtccacacatacatgtacataagctagtctcccaaacgagggaacatgtgtgacatccatttgccaaagagaattaggttccaatccttgaggattaactcctcctgtaaaagatgaggaatgcaccatttggcaagttgggcatcgctggataatagctttagcttctttccaggtaatgccgtatctgtgtttgagaccagaggcattaacataggttaaattgtgaaagtgtctagcgttagatattgcattagcaactaggtgatcagccatttgattcccttcagttaaaggtcctggaagaggtgtatgagccctaatgtgagtgatgtaaaaaggatgcattctactcctgactgctgtttgcaattgggtaaataaagccatcagttgctcatctgtgtggaatcgtagttgagcattttcaattaattgtgtggaatgaatcatgtatgaagaatcagaaatcacattgataggcctattaaaagcagtcaatacctcaattacagctataagctctgctttttgaactgaagtatagggcatctgaagcccttacttttcaagccagagttagaagctttaccattactagacccatctgtgaagacattttcagcaccttcaagtggtttgaatttagttattttagggagaatccaattagttaatttcaaaaattgaaacaattttgttttgggaaaatgattatcaagaatacccacaaagtcagctaaatgggtttgccaggtaagactatttataaaagcttgctctatttgtgccttcatgagaaggacaataatttttccaggaccatatccatgtaatttaacaatctgagttctcccatttcctatcatagtagcgatttgatccaaataaggagttagagtccgtgaattagtatgtggaagaaaaagccgctctacaagatcttgctcttgaacaataacaccagtaggtgaatgccgagttgaaaaaattagcaaatctagagtcttttctggatctattatatttatttgagctttatggacttgctttttgatgagctgcagctctgcatcagcttcttttgttaattgccgagggctatgagactagcatctcctctaaggttagaaaatggcataggtaggaatgcctagagtaggtcatatccaattaatgtcccctggtaatttttgaaagtcatttaatgttttcagttgatccctacatatggttactttctgtggcacaatgatagtgtcatttactgaagtctccaagtaggagtaaggagtagcagtctgaattttgtcaggagctataattaaaccagcatgagaaatcaaattttgcaagtgatcataacattggagtaatatttctcgagtggggggcagcacaaagtatatcgtccatataatgaataatgtaacactgtgaaaattttttatgagtaggttcaattgtttgccctacataagtctggcaaattgttggactgtttaacatgccttgtggcaacagtttccagtgaaaatgcttagcaggctgcaggttgtttactgcaggaattgtaaatgcaaaccattcacagtcctgctcagctaaggggatagtaaagaaacagtcttttaaatctatgactattaaaggccaattctttggaatcatagcaggagaaggcagtcctggctgcaatgtccccataggttgtataactgaattaatggctcttaagtcagttaacagtctccatgtacctgattttttcttaattataaaaactggagagttccaaggggaaaatgttggagctatgtgtcctttttctaattgttcagtaactaagtcctctgagcctccagtttctctttacttagcagtcattgttctatccaaattggctcatctgttaaccattttaaaggtataggttctggaagcttaacaatggctgccatcaaaaatgatatcctaaaccttggcaggaactttgtctttccgcttgaagtggttccttcaaatcttgcaaattttttcctagtcccataccagggacataccccatttcatgcaccatacgttgactttgagggctatacaattgctctagaattagaacttgtgctatccattgttgtaacaaatctctttcccataaatgtataggtacagaagttataattggttgaatagtcccatgttgtccatcgggcccctcacaatgcaaaatataattactttgatatacttcaggggctttaccaactccaactatgttaaattgagtgggttgaatttgccacgtggacagccagtgctgtagagaaatgattgaaatgtctgctcctgtatctaccaaacctttaaatttctttccctgaatagttatttcacaggtaggatgtttatcagtaatttgattcacccaataagctgctttgtcttgtttatttgtgcttccaaattctcctattcgtttaatttcacttttccccatttccacatacggcacaatcagaagttgtgctatacgctttcctggctctgctttccaaggaaaagaagtaaatataacaatttgaatttccccattgtaatctgaatcaatgactcctgtatgtacttgcactccttttaaatttaaactagatctacctagaagtaatcctatcatccccccggcaagcatccacagacccctattggaactttttgtggggattccccaagcataaggctcacagcttttgtgcagtataaatctactgtggcactactggctgtcgtgggggacagacattgtacaggggtgagggagtgagctataatatttccctgttgatctggggggtatatcctaacagggaactgccaagcctctatatcaccctctcgtctagctggctcaattcctgcctgaatagaactgagagcagtcactcgaggcactgctagaacagtcactggggcaactacttttcacccagtgtcctctggaaaagaaagatctgtagggtcaggtcactctttttcttcaaaataatgagggggtgaagaagagtagggacaaacctcttcctcatttgccgctttagcttcagccagcaaacaaacctgctgtgtcatctcttctgttactttgttatactttccttccttctcatcattagtgtgaaaaggttctaaggtggaacgcaccagagcccacacttgtcccattgttaccctgatgtttccgagctccccttcttactcaccatggggattgcttaagggtactcgggtgtcctccagcttagttccacattctccaaccatcactccagcgacccttcaactggggttcaagccccacgttgggcgccacttgccgacaccagctcggtcttggagaccctaacccagcggcgctagaggaattaaagacacacacacagaaatatagagtgtggagtgggaaatcaggggactcacagccttcagagctgaaagccccgaacagagtttgactcacatgtttattgacagcaagccagtgataagcattgtttctaaagattatagattaactaaaagtattccttatgggaaacaaagggatggactgaaacaaagggatgggctctggctagttatctgccacgtccttaaggcacagctcgctcatgctattgtttgtggcttaggaacaccttaagaggttttcccccctgggtgggacaggtgttccttgccctcattccagtaaatccacaaccttcagtgtgtgcatcatggccatcatgaacatgtcacagtgctgcagagattttatttatggccagtttatggccagatttgggggcctgttcccaacagcagattctatgaccacttcagccctgcctttacagtttctgtttacctgtaaactttttcttcctgtggcctagggtagttcaggatcactaaaaatgtgttctgtgatatattaataaaaattcctgaaaaatggacttacagcaaaattgattttggtactcaaataattttgaaaaatattgcatgctatgtctccttcttgtaaggttgcagttcacattagtgtagtaaagcctctgagaagacctgaagtaaggaaatctctttaactttgtttaattcagcatttctgaagtacagttagagacaagcagtcattttttattctcccaaaacagaactgagcacacacctcattcattgtatgtcataaagattatattgctataactttttttgtatagtaacatagctataggccaggcatggcggttcacacctgtaatcccagcacttttggaagccatggcaggaaacttgcttgagcctcaggagtttgaggccagcccaggcaacatagcaagaccccatctctagtaaaaaaaaaaaaaaaagacgaacataggcagcctttgattggaagaaaaaaataagataaacaagcatagatatataggaaaacaacattgcattgtcccatcccaatgcagtcccatatgactccccttagttccaagcaagaagagcacctacctggaccttgtgctctagagtaccttgcatgtcacaaacgtgcacttactgacaaagcccagggcatctctgtcacttaggatccagtgcttggcactagtacagcgtgactggtaaccctaaacatccgttcttgggactaatgctattcaggccccaggaaaatacttctatacttctccacatctcttgccttgtgtcatcaaaagacaattgcatccaaatgcaacgaaagtttgtggacagcgctttggagtactgataggattttggctgcaacgtgcttaggtaaaaggaaaagacaaattttaaaatttgccagattctgccgggcacagtggctcaagcctgtaatcccagcactttgggaggctgaggtgggtggatcatttgaattcaggagtttgagaccaggctggccaacatggttaaaaccctgtctctactaaaaatacaaaaattagtcgggtgtggtagcacatgcttgtaatccccagcgacttgggaggctgagacaggagaattgcttgaacccagaggcggaggttgcagtgagctgtgatcatgccacggctctccagcagcctgggcaacagagtgagaccctgtctcagaaaaaaagaaagaaaagaaagtgttggtcaggcacagtgggtcatgcctataatcccagcactttgggaggcagaggcgggaggatcacttaaacccaggagttcaagaccagcattggcaacatagtgagaccctgtctctatatttaaaactttttttaagtaaaaaaaaaaaaaaaaattaaagtcttgccatgaaaaaacgtcagctcaactaaaaccttgtgcttaggaattctgacacaagcccttatctcattgcaggctgacaacaaagagctcccagaccaggcctcagagcacactttgaatagaattgctttagattagtgatcagcaaacatttttgtaaaggactagatagtaaatatcttaagttttgtaatccacataaggtctctgttacatattcttttaaaaagataactctttaaaactgtaaaagccatactgagggcttaaggggccattcaaaaacaagccataggctgcatttagcccttggctgtagtttgctgctttacttaaaactgttcttagagtacaaattatgtgaacaatcttgattataaaagcataattagtgattttgttgaaataaaagcaagaaaattaaattatgtgggataaatatacgataatttacaaattatatatatgtgtatgtgtctttgtttttttgtttgtttttgagacagagtctcactctgttgcccaggctggagtgcagtgttgtgatcttggctcactgcaacatccgcctcccaagttcaagcaattctcatgcctcagtctctctagtagctgagattacaggcacccactaccatgcccagccaatttttgtattttttgtagaaaggaagtttcaccatgttgaccaggctcatcttgaactcctgatctcaagtgatctgcccaccttggcctcccaaagtgctggaattatagccgtgagccactgcacccagtcaagtggtggtttttttgaacaactaagagtaggcaacatatcaaagcaatggaatttatttatttgtttattattattattattattttgagacagagttttgctcttgtcacccagactggagtgcaatggcgcgatctcgactcactacaacctccgcctccgacattcaagcgattctcttgcctcagcctcctgagtagctgggattacaggcatgtgccaccacacccggctaattttgtatttttagtagagacagggtttctccatgttggtctcaaactcccgacctcaggtgatccgcccacctcagcctctcaaagtgctgggattacaggaatgagccaccatgcccagccaatttaattattattattatacataccttggtgttcagttgatggattgttgatgtttggacgagtaagaacaaatggctcagtgcggtggctcacacctgtaatcccagcagtttgggaggctgaggcgggctgatcacctgaggtcaggagttggaaaccagcctggccaacatggtgaaactctatctctactaaaaatacaaaaaattagctcagcatgtggcatgtgcctgtaatcccagctactcgggaagctgaggcacgagaatcgcttgaacatgggaggcagaggttgcagtgaggtgagatcatgccactgcactccagcctggtcaacagagcaaaacatatttaaaaaaaaaaaaccccaaacaaacaaaaccaccaccactttacaattctttttaattttgccactataatgacatctttgtcaaggtaagaggatagaacattaaacactttgctagcttcattttttatagctttaaatatttacacataaggatgttggttttcatatgtactcttttttttaatctttagagacagagtctcactctgttgcccaggttggagtgcaatggcgcgatctcggattcaagtgattcttgtacttcagccacccaagtagctgggactacaggcatgcatcaccatgcccagctaattttagtattttttgtagagatggggtttcaccatgttggcaggctggtctcaaatacctgggctcaagcaatcctcccacctcagcctcccaaaatgctgggattacaggcttcagccaccacgcctggcttgcttaacctaatttgagttggttcctgttacttataaacaaagtgtcctaaataatacaaccatgctgtacaactgcctgtttccaaaacagaaaggcatacataaataaaaagttttctccttcgggcagtttggaagcaaaaaccaggtcacagacaataccagccacataggctttcctccagccttgagtttcagacacaaccaaagagcctggaccaaaccaatgacaaagctatccttccaggacactgagtatccccctgatattttctgctaaactccaaatttcaggaaagctgggtacaaatagccaaataattgcatgggcctccagggggcgctcaagcctgccctctctgtttcctttacttcttccccacccgcttaacccaggaaaggaaaactgcggctgtgcttttggagaggacggatcttattggctactgggctactggtctttttcttgcctgcataggtgtgtctatttcctgcggctgaagtagaaattgggtctgaggtcagctggcttcttctccactcttaggaaggtttttgattttttttttttttttttttttttgagatggagtcttgttctgtcgctcagggtggagtgcggtggtgtgatcttggctcactgcaacctctgcctcccgggttccagcaattctcctgcttcagcatcccgagtagctgggactacaggcgtgtgccaccatgcccagctaattttttttttatttttgtatttttagtagagacggggtttcaccatgttggccaggatggtcttgatctcttgaccttgtgatccgcccgcctcggcctcccaaaatgctgggattacaggcgtgtgccaccacacctggccaaaaatctcataatggtttaagaaggtttacaaatttgtgttggcccgcattaaaagccgtcctgggccacagattggaccagcctgctctaggagaagcacccctgtcctttaccttccagatctacatctggtgggcagtgggcaggttgacctttctgaaacctacacacagctttaactgctcacttcctgttagtggtgttcacaggtgtgggcatggccttaggagtaaaaactcattagctgttaacagtcagggttttaaggaaactgaattgccaatgaaatctgattggcagttccttaaaacttacaggtttcctgtcacttccagtcacttccagacatctcgtctagacatatctttgagactggggaacctattcttgtaaccacaggccaccacccaggcctctggcgctcagttaaatggcttctgccttgaggctattcacaatagtcgtctctagtacagagggaccatctataatctgctctttgccccagtttttcctcttcgtgggcagaaaatgtttaaagcactgtgatgcagcaagctggtctcttgcccaaatcagtgtcctgctaagtcccctgtctctgtggatgctaactttcacttggggtacagaattcagcttttccagtcctgtaacactccaagttgtaggatttccggtaaacttggattgcaagccactctaagcaaaactgaaaacttaaaacagggcaccttcagcctaaaagatgtctcttataggacctgaagactgcatgaaatcactaactcctgccagcattccaattttttcctaccatttcccctaattctacagtcctgataggcacatagtctgtgttccagacaccagcaccaatttcaggatcattaaattttgaagaggtgcctgctctccaccctacctcttccactcaaccctgcatctgtcttgacagagggttcaagttaacacacagcttttctttttcttattcctttgcttggatgctcctgcttcctttatgcccttcagtttcaaacaagttcaattcaagttatattcaaattagaatataaattctaattccctcatctttaaattttaccaagggattatcaagatgttcctcatgtaactgagtaatctatataactgtatatgcctctctcctataccattgtgcttgtaaagatcccagctctccacatgcaaaggacacaaaacgcattcatcataaaagaaaaaaaaagatacatttgactttatccatcaaaatttaaaccttctgctcatcaaaagacattgacatggtttggctgtgtccccacccaaatctcatcttgatttccacgtcttgtgggagggacctggtgggaggtaattgaatcatgggggcaggtctttcccatgctgttctgtgacagtgaataagtctcacaagatctgatggttttaaaaaggggagtttcagccgagtatggtggctcatgcctgtaatcccagcaatttggaggccgaggcaggctgataacctgaggtcaggagttcaagaccagcctggccaacatggtgaaaccctgtctctactaaaaatacaaaaatgagccgggtgtgatggtgcatgcctgtaatcccagctacttgggagactgaggcaggagaatcgcttgaacccaggaggtggaggctgcagtgagctgagatcatgccacttcactccagcctgggtgacaaagcaagactctatctcaaataaataaataagtaaataaataaataaaaggggagtttccctgcacaagctctcttcttgtctgccaccatgtgagacatgccttttgccttctgccatgattgtgaggcctccccagccacatggaactgtaagtccattaaacctctttttcttcccagtctcaggtacatcgttatcagcagcatgaaaacggactaatacagaaagttggtgttactgggggtcaatttttctggctggaaatctctgtagccacagtgcctttgcctgagttcttgtcctgcatccggaagaatgaggtatgcagacaagtaaaaggtgatgaagagttttatttagtgttaggacagctcagaggagtgggtacctcctctctgcaggcaggtcgtccagtcaagtgtttagctcttagcagagaggaggccctggagaggatagttcctctcctcagccaagtcattcagatgtctcggtaggtctctgaagctctcagcagagagaagtaccctctctgctggtccctcatctctgcagttctcagcagagagggtattcctctctgcagctggttgccctgtcccatagatggtactcctctccagagctggagtagatggtactcctcctctctgcagctgttcgtcctgtcctgtcctgtctccctgccctctttgtcctctggccatcctctgcctgctctggctgagcccagggcttttatggacctcaaagaggaggaagtgcatgccgattggtccatgagcagccatgggcaggccggaagaggtaccacgagtctgcactccagtctgtgggactggcagcccagcccccagcccccagccctcaggccctccttggcctgacggtggggccttactagggaccccacccacttctgcccaggactgtctgcctcctgctactattcatggctctggggcttggccttaaccctgctctgagatgggagtgtgtgccaggagtgcagagaggccaggcagtgggagcagacacctctgagcttgcagggatggggtgggggagggggtcctttctggggcacccgagggtgcagggtgcagagacgcctaggtcctgcacctgggagggcagccgcagctgcacctgggagctcctaccccgctaacttggaagaggcaggcctccttcttgtccctggctcctgcttgcttcatggagtgcgaggcccaggtctgcagttgcgggtctggcagctgccgctgcacccaggaggacaatcctgcctgcacctagctcccccaagagcacagggaggctcagatccatagctgcagtttgcatagccccaggagggtgaggcttctgcctgctctgtagagcaggagggctgggtctgcagctacagtttgggcagctacagtggcatggggcacccccgtcccaactcagaaagggcaggtctcccactggctccatggagtgtgcagccctagccatgcctccctgatgcagctggcaggatggcagcagccactgccatcattggtattgagagtgaggtgctgctgaaaagatactcaaaaatgtggcagtgactttggaacggggtaacaggcaaagggttgaacagtttggagggctcagaagcaaacgggaaaatgtgttaaagtttggaactccctagagacttgttgaatggattcaaccaaaatgctgataatgatatggacaatgaaatccaggctgaggtggtctcagatggggatgaggtacttgttgggaactggagcaaaggtgactcttgttacattttagcaaagagactggcagcattttgcccctgccctagagatttgtggaactttgaacttgagagatgatttaggatatctggtggaagaaatttctaagccttaaagcattcaagaggtgacttgggtgctgttaaaggcattcagttttaaaagggaaacagcacaaaagtttggaaaattcacagcctgacaacacaatagaaaagaaaatcctggctgggcatggtggctttcagtcttcaaaactttctcaaatctgtctggtctcatacctgtaatcccaacactttgggaggctgaggcaggcagatcacttgaggtcaggagtttgagaccagcctgtccaacatgatgaaaccctgtctctactaaaaatacaaaaatcagccaggcatggtgttgtgtgcctgtaatcccagctactcgggaggctgaggcaggagaatcacttgaacccagaaggtggaggttgcagtaagccaagattgcaccactgcattacagcctgggtgactgagcaaaacaccatctcaaaaaaaaagaaaagaaaagaaaagaaaatcccattttctgaggagaaattcaagccagctgcagaaatttgcataagtaatgaggagccaatgttaatcgccaagacaatggggaaaatgtctccagggcatgtcagaggtcttcacggcagcccctcccatcacaggcctggaggcctagaaggaaaatatggtttcattggcctggtccagggtccttgtgctgagtccaccctagggatttggtgctctgcatcccagctgctccagctgaggctgaaaggagccaacatagagcttgggctgtagcttcagagggtgtaagccccaagccttggcagcttctacatggtgttgagcctgcaggttcacagaagtcaagaattgagatttgggaacctccacctagatttcagaggatgtatggaaatgtctggatgcccaggcagaagtttgctccaggggtggggccctcatggataacctctgcgaggggagtgaggaaggtaaatgtggggtcagagcccccacacagagtccctactagggcaatacctagtggagctgtgagaagagggccaccattctccagagcccagaaaggtagatccaccaacagcttgcactgtgcactcaatgccagcctgtgaaagcagccaggagggaggctgtaccctgcaaagccacaggggggtgctgcccaagaccacaggaacccaccttttacatcagcgtgatctggatgtgagacacagggtcaaaggagattattttggagctttaagatttgactgcctcactgaatttcggacttgcatggggcctgtagcccctttgttttggccatttttttcccatttgaaacagctgtatttacccaatgcctgtacccccattgtatttgcttttgattttacaggctcataggcagaagggacttgccttgtctcggatgagacattggactgttgacttttgagttaatgctgaaatgagttaagactttgggggactgttgggaaggcatgaatggttttgaaatgtgaggacatgagatttgggagggactggggcagaacgacatggtttggctgtgtccccacccaaatctcatcttgaatttccatgtgttgtgggagggacccagtgggaggtaactgaatcatgaaggcaggtctttcccatgctgttctcatgatagtgaataagtctcacgagatctgatggttttaaaaaggggagttccctgcacaagcactcttctcttgtctgccgccatgtgagacatgcctttcaccttccatcatgattgtgagatctccacagccacgtggaactgtaagtccattaaacctctttttcttcccagtctcagctatgtctttatcagcagtgtgcaaacgggctaatatagacactattaagaaagtgaaaaggcagctggccacagtggcttgcacctataatcccagcactttgggaggctgaggtgggcagatcacttgaggttaggagttcaagaccaaactggccaacatggtgaaaccccgtctctactaaaaatacaaacattagccaggcatgctggtaagcacctgtaatcccagctactcaggaggctgaggcacaagacttacttgaacccaggagtcagaggttgcagagattgtgccactgcactccagcctgggtgacagagtgagactctgtcttaaaaaagaaaaaaaaaaagaaaaaaaaaagaaagtgaaaaggcaagccacagactgggagaaaatgttcaacatacatatatttgataaaggattcatatcaggatatataaagaattcctgtaaattaataagaaatttttttgtgtgagacagggtcttgctctgttgcccaggctggagtgcagtggcacaaccagcccagctaattttttaattttttgtagagatggggtcttgccatgttgcccaggccaggaaaaacattttcttaatgaataaaatacttgaaacagcacttagaaaagaacatatctaaacagctagtaagcatgtaaaatagatgttcaacatcataaccatcagggaaatacaaattaaaaccataaagagatcattatacacccaccagaatggctaaaatttaagagactaacaatgccacctactaacaaagatgtagaactggaactctcccaaacactgctggtgggagtataaaatagtacaagaaccttggaaaactgtttggcagttcctaataaacttaagtatacacatagcctatagcccagcaattctattcttaggtttatacccaagaacaaaaaagagttgtacaagagtggtcatagcagatttatttatactagccccaaactgtaaacaacccaaatgtccatcaactggagaatggatcaacaaatcgtggtatagtcatacaatgcaatattactcagcaatgaaagaatgtactaccgatatataaaatgacaaggatgagtctcaaaattgttatttatttatttatttgtttatttatctgagagggagtctcactctctctcccaggctggagggcagtggcgctatcttggctcactgcaacctctgcctcccaggttcaagcaattctcctgcctcagcctcccgagtagctgggattataggcatgcaccaccacgcccagctaatttttttgcatttttactagagactgggtttcaccatattggctaggctggtctcaaactcctgatcttgtgatctgcctgcctcggcctcccaaagtgctgggattacaggcgtgagccaccctgcccggccttcaaaattattgatttaattttgttgattgattttgtgtctggcaaaagaaaccagacacaaaatacactacagataagtgagtttcatatatgtaaaatttaagagcagccaaaagtaatttatggtgatagaaaccagtacagtgattccagggaggtaggaggtaatggcttgaaaagagtaccagagaactttctggggtgatggaaatgctttatatcttgatctaggtgatggtgacacaggcgtatacatttgtgtaaaaaaaaagtattggtttctccagttacgatttgtgcattttccattatataaataacaattcaattacatgtcatttaaagggataaggctgggggcagtggctcattcctgtaatccagcaatttgggaagccaaggcaggaggatcacttaaggccagggatgcaagaccagcctgggcaacacagcaagattcctgtctctattttaaaaaatgagataaattttatatattctgttattgaacaatcttcaacatatgcaacatatggtgctaataaaacaaggtgcagaacagtgttttgattttttctaagaaaaagaatatgtgctgggttcagttgctcacatctgtaatcttgtcactttggtaggccaaggcaggaggatcacttgagcccaggagtttgagactagcctgggcaacatagcaagactctgtctctacacaagaaaagagaaaaggaatattcatattcatatacatgtatatttgttgggttttatttatttattttttagacggagttttgctctttttgctcaggctggagtgcaatggcacaatcttggctcatggcaacctctgcctcccgggttcaagcgattctcctccctcagccttccaagtagctggtattacaggcatgcgccaccatgcccggctaattttatatttttagtggagaaggggcttctccatgttggtcaggctggtctggaactcctgacctcaggtgatccaccagcctcggcctcccaaagtgctgggattacaggcatgagccaccgcacccagcctcattttgtattttgttcaggaatgccagatccttctgggcaatagggcttggggcagaaggggcaagcccagagactcagggcatccctcctcacactgcacaaggaggtgctggcagcttgtctggctcagccggggatcccaaggtaaagtaggggattcgtggcaggtatcacctaagctgggtgatgaggacacagagcaagacagattctatcccagctaactgtgagaagcttcagaatggacaaaggaaatggactgaatatggctatgacagtgaacaggaatactttccatttaactactcaaagcacctgttattccatccactacatatttacaggcttacaaaaaacttgaagtccctaatccttgccttcaagttttttttttgagacagagtttcgctctcgttgcccaggctggagtgcagtggcacaatctcagctcaccacaacctccgcctcctggtttcaagcgattctccttcctcagcctcctgagtagctgggattacaggcacgcgccaatacacctggctaattttgtatttttagtagagacggggtttctccatgttggtcaggctggtctggaactcccgacctcaggtgatccactcacctggacctcccaaagtgctgggattacaggtgtgagccaccgtgcccagccttccttcaggtccttcctaacccctggcctcactgttctccccctctgcctgattcagccctcagtctcagtgccagggctgaagccacactgaccccacctctagcagaacctaggactctcccatgcttcaggagccacttgaggaggctgggtctgttctcaaagatgccatgggttgccatctttacaatgtcatgaactgtggctttatgttaatagaaactagttattctggggaaggaagattacatcctgtctcccttttctctcttatcattaaaaaattagtaaatgtggccaggcacagtggctcaggcctgtaatcccagcactttgagaggcagaggcaggtggattacttgaggccaggagtttgagaccagcctggccaacatggcgaaactccgtctctactaaaaacacaaaaattagctgggcgtgatggtggtgcactgtagttccaattactcgggaggctgaggcaggagaatcgcttgaacctgggaggaagaggttgcagtgagcggagatcacgccactacactctagcctgggcaaaaaagccagactccatctccaaaaagaaagaagaaagaaaagaaaagaaaagaaaaagctagagaatgggagtagggagaagtggaagtaggaaggtggagtcacctttaccctcacactggacagaaggaactatctcctatgcattgtcaaagaatatcatcatggccctttagggtttctaaagtagcttttgagaaattaatttcaatgcactctcactggtgctcacagaacccgcgtaaggaagaaataaacaggaaagctgaggtccaaagatgctgaagtcattcaacttcagctttaatagctcacccttaagtcataggagcttaaggggagattggcttgtttcccaaaatggaaaatctttactgtttcttctgacaatatacaagagttattcttttgtcaagccatatggaaaaacagaaaagtccttataaatttactccccagagataaatcatcaacagagcatttcagatttgggctaccacgctcttgactgcatgcaacggaaaaggactgggtacattaagcaagaaaagagacttattggagggatgtgagatagctcagagcaccagagagaggctggaaaagcaaacttcggaaggtgggcagagccaaaggggaactgggcagccaggacctcaggcaaggtcaggatcctgggccgtgtggttaggatgccagttctgctgccagtgggcatggcctggctgcccccactgcccctgggacactgggtgtcacagccaccactagtagcagaacgagttctaaaatgcccgtttctgggcatcagtctctggattttaagtctaattggccaagctacatctcattctgactgctggagagtgagtatatccaccttggagcacagctgctgtcactcagatccacacagtgttggcgccctcaagaaaggaagtcagatgtcacacgtcaaataaatggtaaatgttcattacacacatgtagaacttttctgtttgtttataagtcatggggtattatacatattactatatattgttagtacatagtatatatgaattagatattattagtatatattattaaatgatgtattttatttatatataattaatgttatatataattaatatatattattatacacactaattggtacaacactattatacatacaaattggtaagtagattttacctactattatcatattgttatacatactaattggtatgtatacatactaattggtaagtcgattttattattatcatacataataattggcaagtggcttttttgttttggctttttatattattacaataagttattccctaaattcttgcacaatatttattgtgtagatattgttattaccaattttcacttggacgtttattttctgttttttactattataaaccacacagctgagaacatcctggaacatacgtcttggcacttgccttggtgtttccgtaggttaaagtctcaaagatgaaactgctgagtcaaatggcgtgtaaaaatttaatgtagccagattgacctgcagaaacttccgtttacatacacgctcactaaaatgggggagagagcccagaggggagtgtcttttccactgatctgatttaatcctaaagttaaggataatcgcccagcaaggaagggtatctgagtgttatctcagcagtcccacctggtggtttttaattaggcacacacgcatgtggaggcgaaactttagaacggttttctcgtgagctccagccacgtgaaacagtaggactcgcaccgacgcagtcaggctgggggcgcaatttcaaagtctccgttacgcgcgtccctggggcgcctggggtttgaaccgttgttccccacatgctagtccgcttcccttcccgcttggccaaaataccttttctaaggcactccccacgtaaataaataaataaacaacccaggctccgtgcgccgcgcctcctgccctggagctggggttggagcaggctttccctggacccagtccggccccacatcgccaaccccgccagcctgctgcctttccgacctcccagcccccggaggagcgcaggaagacatgatatccccgggaccagaaacgccgggaacacgaaggacgcagaagccctcgccacgccgcccgtggggccccggtccagggcccagtccctcaaacacggacaccgctgccgctctggaaaggccgcccagagccctcctagcttgaggagactcgcggccgccttaagaagccagcaggtcccatggtgtaatggttagcactctggactttgaatccagcgatccgagttcaaatctcggtgggacctcacgagactttttggtcctacaattcctgttttggagaccgcttccggcagcagccacctcgggctgtgtgggtagcctcactgacctggcctacagcggcttggggtccctccccctctctcaagatgttttcatttcagggccgttctgggggtgtcagtgcgcacgcgcgagagtcgggcagaaaaataaatgtgttgatgggagagcgaacgcgacttcaccctggagggcagcttccgaaagaacccgaaggatcaggaggatgctgcttcgggcggggcatagctaggtcggccggtctaggaggtcccaggttgccgagggtgccgtcatgcttcttattggctactgagcaagcgcgatacgttactgctgcctgagccgccaatgaagtggcgcgacagaaccaaggggcggggaaacggcgcctgcgggactccaattggtcacgaacaataacgaggctgcgctccccagaggggtgtgtttttggggtctggaacgcaccctagtgtgtttgtcttggttgtccggtgctcagtgaggttgtctgtgtctgtcagtcagaaaacaggcccttaggctgtatgcggtggctcacgcctgtaatcccagcactttgggaggccgaggcgggcggatcacctgaagtcaggagttcgagaccagcctggccaacatggtgaaccctcgtctcaactaagaatacaagaattagccgggcgtggtgacgcgcccctgtaatctcagctactggggaggctgaggcaggagaatggcttgaacccgggaagtggaggttgcagtgagccgagatcgtgcctgtgtactccagcctgggagacagagaaagacgtcatctcaaaaaaaaaaaaaaacaaaaaaacaaaaaaacaaaaaacaaacaaaaaaacagtccctagatgctgtagttggtgaaagagagaagagattaaaagaaagaaagaaagaaagaaaacagtcccttagatgctgtagctggtgaaagaggaaaggagagggagagagacagagagagaagaggggagaaagagagagagagagagggtgaggggggggaggggaagagaagagaaagaaagaagaaaaagaaaaacagtcccttggctaagggaccggttcttcagcccgccagggcgtcttaagcgagtcttcagacggattgagcgcgtctctctgggcgaatctgtccaggatccgtgtttagggtgccgagcaggggcacgtgctttgcaggaaagggcgtacctttaggattgtatgggagagacctgcgtgaagcagcttctttggatcagcatctcggttttgagaggtgcctgtccctctaggataagtaacaagggagtccgctgacgcatttatgatctccccacagggtgattggcactgtggttatatgttcccgccccttgggaggatgccatggaaacacagaggatcctcccgctgctctcccacctctcccctgagcacccgttctccccaccccaccccacagtctccctaaatggttgaatggatctgtgtgtatgagcaatcccagcctcaaaaatacctagccatgagacgtgggaggatttgctccaccagagcgtaaagcttattatcaactgcaagctatagaaattgaggtagttcagtactggtgcaaggatgggaaaacatgccaacgcaacagaatagggaacccagattcagccccacaagtatctggacaattgatttatgacaaaggtggcacaacagaggagtgggtaaaagaactttcttttccttttattctttctctcttttttctcctcctctttctcctcctccccctcctactccccattcctcctctccccctcctccttctctttttttcttctttttgacagggtgttgctctgtcgcccaggctggagtgcagtggcacaatcacaacttactgcaacctcgaactcctggactcaaatgatcctcccccctcagcctcctaagtagctgggatggcaggcacgtgccaccatgcccagctagggcctacttttcgataaattgttctgggacaattgagtgtccatatggaaaaatacgaaatcgaattcctccctaacttatattaaacagagaaataaattccatgtgaattgtagacttcaatgtgaagaaaaaacaataaagcttctggaagacaacataggagactatcttcatgacctcaaggtaaggaaagtcttcccaaaaaagacaaaaaacgttctaaaatgttgatatacttcaccatattaatgtgatactatatgttctccttgtcaaaagaccccaataataaaatgacaaggtcagccacagaataggaaaagataattgggtttttttgtttgtttgttttgtgttttgagatagaatctcactttatcccccaggcttgaatgcagtggtgtaatctcagctcactgcagcctcaacctcccaggttcaagcgattatcctgcctcaagcctcctgagtagctgggattagaggcctccagctaatttttgtacttttagtagagacggggctttggcatgttggccaggctggtctcgaactcctgacctcaagtgatccacccgcctcagcctcccaaagtgttaggattacaggtatgagtcactgcgcccggcctaatttttgtatctttagtagagacagggtttcaccatgttgcccagactggtctcgaactcctgagctcaagcgatctgtccacctccacctcccaaagtgctgggattacaggtgttagccaccttgcccagccaggaaaagacatttgtaatgcataactgacaaataacttaaatatagattacaatagaaaaatccagccaggagtggtggctcacacctgttatcctaacactttgggaggctgaggcaggcattacttcagcccaggagttggagaccagcctgagcaatatggcaaatacccatctctactaaaaatacacaaattggctgagtatggtggcacagacctgtggtcccagctactcaggaggctgaggcaggaggatggcttgagcccttggggtcaaagctttagtgagccatgattgcaccactgcactccagccttggtgacagagcaagatcctgtgtcaaaaataaaataaagtagggaaaatacatagtcagtttgggtttaaaaaaaaaatcctaaaaatcaataagaaaagacaatctaatagaaaaataacaaaaggcttgaacgggcacttcactgaaaaaggaaactgaaaataactgatatacatatgaaaagatgcaagagatcattagtcatcacgcgaacgcaaattaaaaactcaatcagataccactacacactcaccagaatgccagtgctgatgttaagaatatggaataatgtgaacctttgtagaagtgtaaattggtggaaaacagtttgacattactatagttggaaatgctagaccctatgatatagcaatttcactcttgcccatatattcacagaaatgtgtgcatatgtgcacctagagacatacataagaatgttaggctgggcaaggtggcacatgcctgcaattctagcactttgggaggccgaggcaggaggatcacttgaggccaggagtttgagaccagcttgggcaacatagtgagaccccatctctattttaaataaaagaaaactttgtccaccaacgggaagtcaggataaagattttctactttgggccagtcaaaccacatctggaggattgagatcaattctgggtatcacacaaagacattggtaaatttcatcctgccactaactggctgggtaatttgggtaagcaatttaagtattctgagcctcatatgcaaaaggataatagtagtaccttttgcatagcagtgttgtgagaattagtaaaatagaaatgtaaagtctttatatctatatctgatccgtaatatagtcaagaatggtagctgctagagaaacaactagaatagtgaagtctatggaagctcagatacttgagaaacacaaatacttacaccaggaggaagacgaaacttagaggtcacaagatagctttcttagtttatttgcttatttgttcctagtctggattacaacagaggcagagaattagaagtcatgggtggaagttagaggggcaaagaggatgaactttctaacaacttgagcagtccattggcagaacagtgtattcacccagggggttcttcctgccggctgcacaaaccaaatcaattcaccaagacctcagcattgcattaaagaaagagttcaattgacactaggtctgccacatgggagatggagttattttattttatttttttagacagagtctcgttttgtcatccaggctggagtgcagtggtatgatcttggctcactgcaatctctgcctcctgggttcaagcatttctcctggcttagcctcccaagtagctgggactacaggcatgcaccaccacacccggctaatttttgtatttttagtagagatggggttttgccatgttggccaggctggtcttgaactcctgacctcaggtgatctgcccgcctcagcctcccaatgtgctgggattacaggtgtgagccaccgcgcccagcctggagatggaattattactcaaatcagtctccctgaaggctcagaagttggggtttttatgaacaatttgatgagcagggggctagggaatggacactgctgactgattagggattaaatcataggggtgtggaaaacagtctttctgtgctgaatctgcctctgggtggggccgcaggcccggttgagtcatgaatcactgatctaggtggggtctgtcagttgccagaatgcatctcaaaagaccaagcctaggttttacaatagtgatgttatctacagggggcacaaatcacaaatcttgtgacctctggccacatgacctcggaacagtaaaggattatagaaattatgcctacatttttggtccctgagcaaggaggaggttggttttagggagggactattatcatccttgctttcaagttaaactataaaccagattcctcccatgtttagcttggcctccgtaggtgcaggagtgagctgaagacagccagtctgtgaggctagaagcaagatggagtcagccatgtcagatttctctcactgtcagaatctttataaaggtggtttcaacaggcttgagaaatactgagctgctggtgcctgaagtcttccagggaggctcaaagctctttgtcagttgtgagtgtaggaagatttctgcactcagatggagactgggctccacaaaatgtaccctgccttcctctctgaggtttggttcgtctgtgaatcctcattcccagtttaggactttactcaccatgagctttttcattatttctcctatggctttcaccattttttgtttgtactaagaccctcagtaagatatctgtttttcatcagaaaccagtgtacacatacacacatgcacaaaactgaaataaaggtttaagaaataacatgtactccactcccattgcttcacttgactaaccttttaaaaacaaaccaaaaaaaaaaataaattaaacaaaaataatatttggcttggcgtgatggctcatatctataatcccagcactttgggggagctgaggtgggaggatacttgagcccaggaatttgagaccagtctgtgcaatgtagtgagatctcatctttacaaaaaatttaaaaattagccaagcttggtggcacatgctcctctagtcacggtgactcaggaggctgagggaagaggatcacttgggccccataggttgaagctgcagtaagctgtgatcaggccactgcactccaacctgggtgacacagcaagaccctgtctcaattaaatataaagaaataatattcacatgtaaaagtatactctgatattttttcttttctttccttttttttttttcttttgagacaaggtctcactctgttgcccaggctggagtgcagtgtcatgatcaaatgatcctctcacctcagcctctccaggagctgggactacaggtgtgggtcaccacacctggctaatttttgtatttttagtagaggcagggtttcaccatgttggccagtctggtcttgaactcctgacctcaggtgatccgccggtctcggcctcccaaagtgctgggattgcaggcatgagccaccacacccagcctctgatattttctatgtattttatttttgttaaactggtcacaatctactaacttgattctagaacctgtaattgataaaacacttagacactcactaccatcccagctggccttcttctcctagctccagtttctctaagacctcctctacatgtccgtctctttctatgcccagtagcttaggaagaacatctctttctcctcacagcagtctgaaagcctctccaatggttttattctggtgaaggggcccggggcatagcacactgtagccccacatttctgggttcacgtgatcctcctgcctcagcctcctgagcagctaggactacaggtacagaccactgtgtcctgtgtaagcctgtaagttataaaatacgtacagtcttttttttttttttttttttttgagacaggatctcactccaatgcccaagctggagtacagtgatgcgatcacagctcactgcagccttgacctcctgggttcaatcgaccctcccacctcagcctcccaagtagctgggaccacaggcatgcgccaccacatccggctaagttttatattttttgtagagatgggatttcgctatgttgcccaggctggtcttgagctcctgggctcaagcgatctgccagccttggcctccgaaagtgctgggattacaggcatgagccactgcgcctggcccacacatagtcttttaatacgtaccatgttcttggtgctagaaatacaaaatttaaaaaagacttagcagggtgcggtggctcacacctgttatcccagctctttgggaggccgaggttggcaggtcacttgaggtcaggggttcaagaccagcctggccaacatgttgaaaccccatcactattaaaaatacaaaaattagccgggtgtggtggcgcatgccagtaatcccagctactcaggaggctgaggcaggagaatcgcttgaacctgggaggcggaggttgcagtgagccaagatcttgccattgcaccccagcctgggcgacagagtgagactgtctcaaaaaaaaaataataataataaaaaaaaagacttgctccctgccctcaagtagcttgaaatcttgaccaataaatcaaaggctaaagtacgttgtaaaatgaaaagcaaggctcgggagtatatgtggatgaaatgtaagtaaaatataggtgtaggtaaggtaaaaaaagaaatccagacgaaaactcggaatagcatgggagtgctaccgttcgtgtaaaaaggggagaacatttatatggcttgtgtgtgcataaaatatctctgcaaggctgcatgagaaactggaacattgatttctccaggaatgaaaccagggagagaaaaggaggaagagactgttcactgtatacccttttacacctcttgaattttgaaccccctaatttttcattacttcttcattcagtcacaaagtctctaggaactcaagaagccagagaaagcttgaagtaatgtttaaacctagttgtgacttactatccagattagctagatgaagaagcggcagcaggctaggggtgtttcaagccctgcatgaactagtcaaggaataaaagaagctccatattgatgcgtggagcctagggggccagggtaggggttgggggtgaataggaggcagagctgaggccccagaggtaataagggcccctcatgcggaagggccttggtggctttggtgcccaggagtctagatttggtctcacaggaagtggccagtgaagaagggtattaagcaagggagctacagagaacccactagcagccgagagcagagtgggctgcagccgggctaggaaggtggggagttctgcaggagactgtggaatcatcagggtaaaaggtgaccaagctttaactgaggactaggcagagggagtaaagcgataaacagatgaacatgtgagagctttagagggtggctccatcaggaattagcttgcttaggaattagcgtgattagatgggctgctgcgggggagcaggggagcggcaaggccgtgtgtgcatggttcttcttccttctctatcctctcccggcttccctggtccctgcttcctcagctctgatactacaggcgatgagtcccccacctctcccatttctgtggtctggtagagaataagaaaatcagaggggccaaggggacgttgagtaactactccaaagtcacctctctgcccctctcctacctcagcttctgtgggaaatgagggagaagggagaggagggcagggagcgagatccttttggtgcttaattcaaaccctgcctgcaactctgcgcctgcatgaatatcctgcctcctccatcagaccagggcctctgtctccctacacaggatcagccatggaatgcgtggagcgcagtgtaaaatgaaaatgtgtaggtcttgttcaaaaattattaagaatttcaagatgaggacagcagagtgttaaacctagcatgcacccttctaagcaggggaccctgtgtgacagcagaggtcgaaggcccataaagctggttctgtccccaggccttaaggtcaagtaggtaattgggtggggttgggaggcaagaggctgtgacttacttttccagaggtgctgaggtcatggtggggtaatccctgtccccatctcactccttgctggcttcatgggtaagatccggaaggcccaagggtgggcggggctgggctgtctaacctactaggaaggatttctagctgctaccagctccaggagctgaggccacattagccagtcagctgttccccctccctgccttctaaggccgaggaatcccgtcctggaagtctctggtgcagtgtggaaggagagtgatacagaactggacacttagaatgattcagttccatgttacttgaccaggaaatcaaggcgttcaagagcattcccttccgcttactcccttttcctggcttggcatccttttactgctcaggaccattagaatctcacttatgtggtttctaccggcagtctcacacgtctgaccctctgtgcttggtcttcttcacactcctcttcccccaccccagcctgagtttctggagttactccaaactctattcttggccctcctttcaatccacacagtcctcttggtcaatctcacccacttttgttgtatcagctactacctctcagtgatcctcaacaggtgtgcaaagggaggaggaaaagcctgtggagtcacgtgggatcacctggtggggaaggctttccaactggtgacaccgccattcacctagtcatccatggaggaaaccagaagtcatccttgataatttcttctccatccttccaacattcaatcaatctctaggccctgaaaattctacttcttcactacctctccagttcatctgctctccattcttacccttcctccccaattcagttcctaatcacgttgggtggctggatcatagtgattctcctttctctggaaactgaccttctgagggtggccctgaaagtcagcagagaaaggaatttcttcctctctgattcttgggaagcaattaaggtttgagtcaggtgatcaaggtcttgaagcataagtgaattgaaaacaaggagatctggggagagctttgtggctggacctctttgggtgagcctggaaactgaaaatacatgtcacaaacaggtttaccagaaggctccctgcaaaagaggcttttcacaagccatagacaggatgaccaaggggctgtctagagctcatgaaacaaagcaaacagagaagcaggaatagaggctatgcctggatggaacagcatggacttctcttcatcaaggccagtgtaggtccactactgcccaatgagcttgcaatggtgaaaccctgagcccctcatacagtaccagacctcaaggcaaccatccagttctctggtggcaggtcaatggaagggacacagaattgtcctcactggaataggcacttattcaggaattgagtttgtattccctgccaacaccaccatctatggattcatgtgatgtcttctaggcagctacggtgtcctagaccaggttagctccaaccaagaagctcttcccagcaaaagaagtaaggcgttaaatgtgggtcctggaacagaaaaatggcattagtgaaaaagctaggaaaatccaaataaagtctggagttccgttaacagtgttatacaaatgttaattttttaattttaaaagtaccatggttatgaagatgttaacattaggggaagccaggttaagggtatatgggaactctctgtactaactttgcaatgcctctgtaaatctaaaattcttcaaaataaaactaccaaagaaacacaaagaaataaggttggggctactgtccacaggatttgctgatctcaccatgtgtctgttatctagaagcaagtggctgagtgataggctgtcctagtaaagacccagggtggtgccaggtaggtggacaccactttgcaaagactaagtgatgtcaggaaggttgctggctgtgctatgaatggaaccagaaacaacttacagtgttttcccttcatggctaaaaaactcaaggatctataggctagaggagggaaaggatggctcagatggcatcaatgacccactcttagaattatcattcttgtcctcctaatcaacagtgtgaaggtctgggcatgcaagaaaggaatgctgcccgctgggcacggtggctcacacctgtaatcccagcaatttgggaggccaaggcagtcggatcacctgaagtcgggagttcgagactagcctgaccaacatgcagaaaccccatctttactaaaaatataaaattagctgggcgtgatggtgcatgcctgttatcccagctacttgggaagactgaggcaggagaatcacttgaacccaggaggcagaggttgcagtgagccaagatcaggccattgtacaccagcctgggcaacaagagcaaaactgtgtctcagaaaaaaagaagaaagaaaggaaggaaagaaggaaggaaggaaggaaggaaggaaggaaggaaggaaggaaggaaagaaggaaagaaaggagggaaggaagccacagggcacaatgtcataatccctttagaagctgagatttctaccgtgccatttgaggctccctgtggcattaggaagagacagaaaagggggtcagaatgtcaggctgatgaccgaccctgagactcagggtgtcctgtgattgttaccacaccctggtgtggccaggaaaggtacaggaggaaccagagaacacctggggcacaatgccccgcggaacggtgggctgaagaagctgctactctaatcagagtcccaccaagggttgaagagcctcaggaacagaggttagagttgccgctctggatccagaaccccaaccagtgagagcctgcctgaagacaggagaataaggactgggcaggtggaagaaggaagctgtagccacatggccgatggctgcatgactggcctcccatcttttttcccttccttactgccagagccctatggaatatttacctttccccattttttgaaggaagaattactgtctttaatgtttttcctttctcattcctcatcttttccttctcttgagcagagtatatggagggtggttgaattgacaccagcttgcagaatggtgagatggagtcaggatggaattgggaagtggagatcctggattttgaccacagaggccctgtgacctcacccttggcatttgggctgtgaccagctggggaagggaggctgcagctgtagtatgtaggatgactattagattaggtttgttttcagagacttgctttcatttctatctagtaaaccctacaagccagaaacttggatgccatccttgacaactcattctccctcactcataactcaaagaagtgtcaagatctgaaaactttatttcccaaagaactcatcagcttacctaccgcccccgagacttatggccactgccctaattcaggccttcctcacctaacccctgatggaaaaatcacctccttaactgccactctgcctttactctttccctgttcaatcttgtaaaaagcaaatttccagccaggcttggtagctcatgcctataatcccagcaatttgggagaccgaggcaggaggattgcttgaggccaggagttcgagatcagcctgtgcaatgtagtgagaccctgtctctacaaaaaaatttaaaaattagctaagcatggtggcacacacctgtagttccagctacttgggaggctgaggtgggaggattgcttgagcccaggaggcagagggtgcagtgagccatgattgcacccctgcactccaacctgggcgacagagcaagactttgtcaccctctcccccaaaaaagcaaatttccttctaacattaccaagtcattcccagcaaataagtttgtttagttcagcaaacaagacccctctaatcacctccaagccctctctagcagcagatcctaaggatctagagcttttgacattcccactccaacctgattggtgctcccattcaaaccatggtcctttctcatatcatgcctttgtttatactggcccaccagaagtgccatccatccacccactgacaacttaaccctttagaactcagctctggatatcacctccttctaaaggcctttcctgtcttccttcccaggactcaacgcaccccttcagcaagattaggtagccctcctatgggattccatcatagccctcgcagacctctccgctgttgcactgagtgtattgtattgtgagtgctggtttgtctgcggctctttcagtcctttccttgctgacaaggcccaggaattggtctgatccatcactacattcccagtccttagcaggatccagcctcccttctgctaaccagaatctgcttaaataccgtcctaggcttcctattgcccttaggataaagaagaaagttcctaactgagttcaccgaaaggtccttcaagacttgaccccaatctccctctctagcctcatgcttttccagcccccattctgcacccctcgacggcatttacattgacattgttcattgccctgaatgtctctcggctgtgtgttcctacactgcccttgactctccccattgtagcatttatggacttaattgtaaattgtttcatgtcttctccactaaattccatgaaaataggagccatgttcgtcttgcacactcttccatccatagtgcccagcactaacagactacttgacaatattaaagaaatcatgaaatcataacttcacaaactcttgttgtcatcaggccatctggggtgatctaaatgactaggaacaggaccatagggtaggacatgatatggagggacaggaccacccaaccctggcccccagcccaaactactctggcgtggaaatgctttattcctaggatgagagtagagggaaaagacggaggggttcccaggtggtgtaagtgcttcctaaggactgccctctggggtcttggggtattgcaggcttctcacaccccaccacccatggggccaaccgctcggccagccacactgtcctcagagtgttcccagcaaggtcagcagagacccagcaggtggaggaaataatgggagaaaagagttgaaggtgggagtggggaatgggttcacaatgcatttgttcagggatctttactcattctgtgatgaagagaaggtgacagttcactggctccctgggggtctaggagacttgggcttggctgaagagggacagacactcagggcagggctccatgccatcagcttatcagacagccacctttctccttgaagggattcttgtcctcagggatgcctttgagaaaaggatcgtttcctgcttgggcctccacgtactccttgatttcctttcccgctttggaaatctgcgagaacacaaaaaatgttttaggtccttgttactgtctctgggtccatgatttggtcagtgccagaaaaacaggcttctgggcagggcagagacaggggccaaagaggagaaagacacagaggacagacaggtgttcgggggtgtgagttccttgatctgacccacaacactgaccctgaccttcatgggctgcttggccagagccagcccagacacagggctggacacgctgagctctccaaggccctgaagctctctcctgtgctcagggaggctggcaccttcacagggtcaaccccagcctttctctgcatcctaccccatcccagaggtacctcctgctgcttctgcagccctggaacagtcccaccaccctttctggtcacttcctccttcccggggctcatcaggaacaggaagggaagagcagggacggggcgaggaggctcaccggaattcttgtgtttttcacttctttcttcagctgctccacctccatcttcaacaggtccttctcgctgagatcctgggccatcctgccctagacagacctgatcctggaaaggattcagcagccaggatcataaatctcatcagctcttccagctccctccacacctcgacttctagcatcttccctgccatatccctcagttcaggcccctcatcattcaacagatattcactccatccttgcatgccctgcttcttcaagagtctgggctcaggaggggaggaagctcccagtctgatgggggaggcaccatttttgcctttggattgtctgtctatggaggaaatttggattgtctgtctatagaggcatctgtctgtctgtctacagaggaaacagagaagaaagaaaaaggagtttctttcagagaggaagatctgggaagcaacgttattgtttcatatagtgactcagagttttcctctttctctccaggtccagcaagggagagtatacaataatggtcaagagaagggggtcttggctgggcgcggtggctcacccctataatcccagcactttgggaggccaaagtgggaggatcgcttgagcccaggagttcaagatcagcctggccaacatggcgaaacctcgtctctacaaaagatagaaaaattagccggggtgatggtgagtgcctataatcccagctactcgggaggctgagatatgagaattgcttgaacctgggaggcgaaggttgcagtgagctgagatcatgccactgcactccagcctgggtaacagagaacaactgtttcaaaaaataaaaaaagatcccaggcactgtggctcatgcctgtaatcccagcactttgggaggctgagacaggcagatcacctgaggttgagggttcgagactagcctcgccaacatggtgaaaccccatctctactaaaaatacaaaaattaggcaggcgtggtggcgggcacctgtaatcccagctactcagcgggctgaggcaggagaatcacttgaacccagaagacggaggttgcagtgagccgagatcacaccactgcactccagcttaggcgacaagagtgagactccatctcaaaaaaaaaaaaaagagagagagagagacaagggggtctggagcttaccagactccaactctgatctgctgcttccttactgctttctcagtgtggccttagggaagtcactcaacctctttgagtattagtttccccagctgcaaatgggtattaaaaaaacctaccacatgcaattattgtgggtactaagaaaataatgtctataaaatattataatatactacctggcacataatgaacacttaatacacttattattatcactaataatgctattgttattattatcactgcagggttatcaggaaggccttcctggtgcctagccccagtgatactaagagtagatcccagcccagtgcaacctcagcccctctcacctgccacagaagagcacactctccaagtcacttgtcctggactcaggtaagatagtgtttgagcctcctagttcttcatcagctgaaaatcttcagataaagcagatggcctggaaaccaaaatctctgatgcctaagctgatcataggctcaaagttctaagcccatcacccgcttgagccttcaagccctcactacagcagagcagagagacagacattctccccacaaaaacaaacgcgaaaacagaagccaccttttcaccaccttgccttgcgttagcctcacacttttggtgacctcactagcttagagcccgcagcgcttctatttctccacctccaccctgcagccccacttaccccgcttcgcctgctttctcctccttcccttcccacctctgagcatgctctgaggctgtccttcctcctgaggcaagtcctagaccggcccctaacctccttaaccaagatgctttgtgttgcccattggatccccacagtttcaccttacgaagttctcctagctcactcttcatccactcattcaataaaaatgtccttgctcaccaagctgtgccacttagtacttggggcgtggccacctctaatgcctctgttcaagcttctttgctgccatgcctccctctgagccctgaatgtgggttcctgagcacagaacccacatcctggtttttttcttgctgtccccccaggaccacccaagggctatgccatttaacagacattgagctcctgctctggttgacacccatccaatgacaagggacccgctggaggagcaaaagttaagggaccaatatggtcaatgggaggtcctcttattctcctgtctctaggatgacaggcttggtggtgggaggggcagagaggaggcccgccgtccatcctaacttccgtgctccaggacccagtccaactctcagctgggagctctaagaatttgaaatcagaacaggatcctggaggttgtctggtacaactgtcctgttaatgcgtgaaccacagcccatacctcctaggcaggctcagtgctctgtccaccgctgcttcctaaaaccgcaagttgatctgaaatttgaacctggtgcttctcaaatccaagtccttcctgttgtctaatctgagtccctcacattacgcttggtcaatttcatcttgtcctgccttcatctgcacagagcgtgtagggcagatcttcatcacacacaacccttcgcaggcttgctaacacccctctggcaacctctctggtcatgtcttcccggtgtccaaccctgacccctcttgctgccgcatcggctgttttctatttttgctgtgctgctgccccacagtcctctggtatgacggatctccatatcctatccaccctccactcccctgtcccttggtgactcatccctgagcttcccaaggaagcccccaccctctgccctttcctcccgccttccatgagtggaaaatccacctccgccccctatagcaggccagcccccttcctccccagtctccgaccccatcccccagccgaccagtttcctctccaggaccagggagcaatcacagctgccccgaccttggcttcctctgctgggtgggattgggggctgggcccccaaatgggcccctggcttcccccttcctctgggcaggggacagagagacacaggctcggggagcaggactgacttcctcttgtcccggaatgagcatgcctgccctttgcaagcaggtttgggtctcacgcagaggaaaccaaaagcaataagagggagggaaggcagagcaaccaatcaagggcagggtgagactcaaaacgagcgggctccctggggagccagacagaggctgggggtgatggcggagctacagcagctgcaggagtttgagatccccactggccgggaggctctgaggggcaaccacagtgccctgctgcgggtcgctgactactgcgaggacaactatgtgcaggtaggtagagcgggcggaagcctgacaccccagcccccggaggggggaccctgagccctgccccaagtggggccctgggacccatcctgacagtgcttgtcctgggccttggctgagaaatcctcccattccaggcttcggcttcatcccagaccccaatacttaaccctgaccccatactacccaagcccccactgtgccccttctgtctctcagagcctcagagatgcctgggacagacagtgcgattccatcctgttctcaggtgtcacctcaggttcatccttctgagttcccacgggtcaatccagagacccaaagcctccgtcctcacacagatgctggcgatcattctatttccaggccggctctgggtgaggcttcagaagaacttcccaaacagcacagtgaacctgagatggacaagggaaaggggctctttccctgagtttgggaaagggagagtggggataaggcagagtaggctgggctaaagagaggggatctcatgcagaggcagggggatggcccacataactgctgggagcaggcttctagcaacagatagggaggtggcattgtagaacaggttttaaattgtgtggttgtcctggggctgagaacatagattcctggattcagggaggagaggcaaggcaactgagccatgatggaaatcacttctgttatttcattaatctgtacaactaccttgtgagacatgtattataattcctattttacagatgtggaaacagtagctcagggaggtgaggtgacttgtctaaggccacacagctccaaacagcagagccaggcattccttttttttcgctcttgttgtccaggctggagtgcaatggctcgatcttggctcactacaacctccgccttccgggttcaagaaattctcctgcctcagcctcctgagtagctggaattacaggcatgcaccaccatgcccgactaattttatatttttagtagagacagggtttcgccatgttggtaaggctggtctcgaactcctgacacctcaggtgatccacccgccttggcctcccaaagttctgggattacaggagtgagccactgtgcccagccagcctttttttttttttgacggggtctcctctgtcacccaggctggagtgctgtggcatgatcatagctcacgtagcttcactgaagccttgaactcctaggttcaagcaatcctcccacctcagccttctgagtagctggggctacaggtgcatgccaccatgcctggctaattttttaaatttttttgtaaagacagggtctccatatgtagcccaggctggtcttgaactcctggcctcaagtgatctgcccaccttggcctcccaaagtgctgggattacaggcataagccaccacatttgggcttccctgaatcctgatgccaagctctttcctctccatctttctgcctccctacacgctatgtgactttacgacagtttattagcactctctgtccccggtttcctctgctccctgaagagctgcagactaaccttgttaccccttgggcaaaactttatttttctaacctgtactaaccaaactatgagaacaggcacagggaccttgtagcatagtaagaatgttgaaaaaagaagtaaatgagtaacaagtgctcatgggaaatggcagattaaagacagtcagtaatgacagcagttaaaatgctctggacccttcttttgggccaggcatgttaccagcatggcctcccttcatcctcatctgaagtccggtgaggcgagtcccatgcccacttcacagtgaggaagctgaggtttggaaaggttaagtcactttcccagaagtctcctagctagtgtcagagcctgaattcaaacgcagaaatctgattccagagcccactccctatgccactaactgaaaatgctactctgggtatcatttcggtctgtgtagatgttgagtgaccacctgcagatgagacagaatgaggcttgcaaaccagctcattctcctagcatggaaaggcatgtttcctctatggacaaggatccaagcagtcctttccattccttccataacttctgcacacctcaaagagcttccacagggctctcatttgcacacacagtgtgcacacacaatttggggtcgcaaagacctaagtcaaatttccagttctgccacctaccaactacaggaactgtggcaagtttctcctctgattctcatgcctgccttcagtggtggctccatggattcaatataaaaatgtatcaaagcattcagcctagtgccagccccttcagaagagcaggataaatggcagctcttacaatgaccatcactaccattcattggaaggatggataataagaatcagttctagggaggagaagctgtccttgcaaaaatatgcagggcatgagaagccctgacccaagttggaatccttggactcctgcttccttcgtgcagagtactaactactagaacacacaacttgttacctttcctggcctttctgaggatctttatctaggcaaatgcctaggaaggttctggatctcagaacttctgttacctaaggcctgattcccctaccctccaaccccacctgcagcccctctctccccacaccacccagatgctaggaaacccatggggaattagggaaggcagaccagggtcacctgcagagttctcagccagggttgactgagtttacagacacggtaatttgcatgatgaacaagcactcagccgcagagatggatctcagacacctgtccctgcggacctaactttgggctaagagcaaagccaggggtcggtaggtgttcaggctgcagatgcccagagctgggcccaagcagacacttttcctgtttgggccaacaattccacatgttcgtttggggaggaaactgtacagaagaaggcaggcaagctaagaaatctgggtggagatgaaggagcagtcactgctcagttctgggcctgtttcctcatttagtaaaggaaggtcctgaactaaatcaaaatctgctctcctgtctggtgttaatatcctgggttgatttctttgcctattcaatcttcttggtgacctatgctgaggagatgtaagttttggtgcatatgctaatgagatgtaaatgacatgcaaatgagcatctctttcctgctgttggaaaagaaagacaaggaggagagagccatcgcatgggctgcccagaaggttctggctcaggctccattagaggctcccaggtgtctcagaccttgctctgagagtttgtaggtctgttctccattgacaggccctgaggggcacccgagggctcaagcaaggggaccccagtgtgcagccttgcctgttggcccactggccctactccacattcaccctggacttgccccctacctgccttagaaaggtacaggctagagtatggcaactccatgacccgaccagagatgaggaagctgcccggggaaccaaaagaccggagaagttttgccctagcccccactgcctgatctgggaccaacaaaaaaaaatttcttggccaggcgcagtggctcacgcctgtaatcccagcactttgggaggccaaggcaggcagatcacctgaggtcaggagttgaagatcagcctgaccagcatggagaaaccgcatctctactaaaaatacaaaaaattagctgggcgtggcggtgcatgcctgtaatcccagctactcggaaggctgaggcaggagaatcgcttgaacccaggaggcggaggttggggtgagctgagattgtgccattgcactccagcctgggcaacaagagcaaaactctgtctcgaaaaacaaacaaaaaaaacttcttgccttcagccactgcctgcttactcctcctgcactgactggcagtgtgaccctggccagtgcctggcacagtgcctagaatacagtgggaatgtgcccagagaatgtttgggttcccattcgacctgctaattaactcacgagtgcatatttatgaagaatcttttgcgtgttgggtgtgattccatgacgggatacaggatgaaacagacaagctccctgctctcatgacacttccgtttaaggcaagggggcgtagataacgaaaaaaatacatagagaatgtttgatactgctaaataccatgaagaaaagagaacaaggtaaatatgataaagaggcagtgaaggcgtgggctgggggaaatcttagtgtggtgaaggaaggtgtctctgagaagctgaggcctgctaataaggattctgaaaataagtacagcacatgccaaggccccgaggcagaaacagttcagcttgttcaggaacagaagcccaatggccaatgtggctgaaggggagtgtgtgagagggggagtggtgaagttggattaaaggggatgaaggtgaagagaaaggcaggagccagacctggaggggctgtacgtaggccacggttagaagcttgaattttatcctcagggtattggaaagctattagagggaatgaatgaataaagtccctctgttctgggcctcagtttccttatttgagttcccagacaccaatctgcagactggagctaaacagtcacatggaaagcttttttttttggtttgattttgagacagggtctcactctgtcacgcaggctggagtgcagtgatgtgattttggctcactgcaacctccgcctcccgggttcaagtgattctcatgcctcagcctcctgagtagctgggattacaggcaggcaccaccatgcctggctaatttttgtatttttagtagagacgaggttttgccattgtagccaggctggtctcaaactcccgacctcaagtgatttgcccgcctgggcctcccaaagtagtgggattacaggtgtaagccaccgtgcctgacatggtttgttgtgtttaaaaatgtcggctgggcacggtggctcacgcctgtaatcccagcagtttgggaggctgaggcaggcaaatcacctgaggtcgggagtttgagaccagcctgactaacatggagaaaccctgtctctactaaaaaaaaaaaattacaaaataagctgggcgtggtggcacatgcttgtaatcccaactacttgggaggctgaggcaggagaatcgcttgaactcggaaggcggaggttgtggtgagccgagatcgcaccactgcactccagcctgggcaacaagagtgaaactccatctcagaaaaaaaaaaaaaaaaagaatgtctgctctagccagtgttgccttcctctttcctttctactattcacccccactccaacccctaaaaggacagcctgttactgaagtcttcaggagggttgtactatcatctgtactcagtcctcagcttaactatttgagaatgggtatctttccctccctttgcatccattccccaaggctgcagattcacttttttaaagtgaatttaaagtgatgttgtagcaagttcctcttgctacatcattctgctgggagccacctcaaacatctaagggttgctgctctctcccaatccagcccctactttccctatatcctctcccatcccaccccagccagccaaggacccagtggaagatgctggcccttaggccagggctgtgtgtatttcaggccacagacaagcggaaggcgctggaggagaccatggccttcactacccaggcactggccagcgtggcctaccaggtgggcaacctggccgggcacactctgcgcatgttggacctgcagggggccgccctgcggcaggtggaagcccgtgtaagcacgctgggccaggtaaggggcgtggggcgtgggaaggcatcttgtgtcaggcctcaactcttcagcccgactcagacattttctacatcaaaagttccttcctgctttcctccatgtccaaatgcccaactctacagcagaaggttggcacttcccaagctttttggacctccttatctctgtggctacgctacaaattccccgaaggcagagctttttctttctcggaattatatcctggacatgagaaagtgttatctaccaatcacagcagcgccctatacaggaaagaagcaaatgaaccctgtttgcatctaaatacaagcagtgccctcataaatatcccagacccagggtgctagcttgacaaggtcatcttcagccctggaagcacagccaccactatacagtatacaccctccaccccgccacagtgttctagcgcacacaccctcctccttccttcctggatccttgaccgaggaattgccccataaagcacatgcacagacccagccacacatttggcctggcctgtacatcacccacatgttcagtgggtggggtgtgtcttttcctcccccgccgcagaccagagttcccaccctttcgaactgtaggctttctccatggaacattctgagaggaagtcaatttacttatttgtcccccaaaggggagagctgatccagccaccattctctgccacctccatattctccccctctgctccgaagtcagccgggtgcttgtctcctcccagcatccctagggatgttgtgttttctcttttcctcctgttcctgcacagctaataataacccatactctctttccaccaggaagttgctccaaagtggctccatcctttcctgctacttttcccaattgctatgtagcctggtggggggcggggggcggggggcagggccctctttttctagacctggctgcctcccccccccagcccagtctttatcttcttcctccttagggggaagggtgctggacacagaccacccctctctgtcaccttgaaccctgtcatgcagatggtgaacatgcatatggagaaggtggcccgaagggagatcggcaccttagccactgtccagcggctgccccccggccagaaggtcatcgccccagagaacctaccccctctcacgccctactgcaggagacccctcaactttggctgcctggacgacattggccatgggatcaaggtagagagaggggccctcctctttccctccaacccaccctctcgtgccttgtggcccctttccctccagaaccccagttctgcaagttttgtccccacttgccactcctttctttccccgctccctgaaaccaccactctgagctcttctccctctccctagattttgtaatccctccctccaaaactggtctgtaccatcctcggaggatctgctgagtgtgagatcctgagcacccctcgcccccccgccctgcccctgtgggcaccgggcgtgtgggaaggggaagagggggaagggaggatgtcagggtgtgcatgagaatggctcccagccacatgagaacagcaacttcctctgtctgggggtttgaggtcactgcactgagcagtcaccccagagctgctgttggtgagaagaagcggggatacagccacacaaaggggacttggtgaagggaggggagcatggcgctggcgtcttctcagcctatgtccttctgcgaggtcagaaagggcacgcactcacacccgtcccaccttcaattcctgtctccacaccttaacatttctgtatcaaaatgagccccttgatatccttaacttatcagccccccttaaaggggaaacgacattctccccttcaaccaccaggcctccttcccaccagtagttctctgttgtccaacttatattttttttttttgagatggagtttcgctcttgttgtccaggttggagtgcaatggcacgatcttggctcactgcaacttccgcctcccaggttcaagtgattctcctgcctcagcctcccaagtagctgggattacaggcgcccgccaccatgcccggctaattttttttttttttttttgtatttttagtagagatagggtttctccatggtggccaggctggtcttgaactcctgaactcaggtgatcctcttgcctgagccacccaaagttctgggattacaggtgtgagccaccactcgcggcccaacttatattctttgtgcttcagctcaaatctcttttgtcttgcccctggtgaagcccatggggtaacactgtacccaccccttggggaagtcccattggtaacagcagttccctctttcatgtaggcgtgcaccctgtcatttgcgcatcccctctaagtggcctgggtcttgctcctctctgccctaactccccaaagccagttccacaaatcttcgaaaatgaaaggtgggacacttctaagtgtgatgtgtcctctcctttctccgccccctcctcagcccgatcaaagttagggaccaccaagccagggccccagcttcctgggctctgagatggtctgggggagggacaggggtgctgggcccactcaacccgctgtggctgtgcagaggaagtggctgtgggctttggtagaactgagtcccagaacccaggcaatgacaagggggtggggtgggggaagtgtaggagaggggcctgagaagtggaagtgggaactggctatgccgggctctccctcccggttcccgtccgcccctcctccatttcctcttggggatgagggtggagggaggcccctcaccccaaatgtaagccctacctcccgctccctcgcaggacctcagcacgcagctgtcaagaacaggcaccctgtctcgaaagagcatcaaggcccctgccacacccgcctccgccaccttggggtgaggcctcgccgcgacgccaactagcctagccctgccccgcgcgaccctgaaactctcctcccccagcctcgccacccacccctggcgcccccgggtgctcaggccgtcatgctggatgcctggcgccaaacctccccctcggccacctgcccttcctgctcgcacccgacccctgctggccagaagccttcctccttcctcctaatacccactccctgccccccgccaggagaccaccccggattcccgagccagtgcacctgccggtggtgcccgacggcagactctccgccgcctcctctgcgttttccctggcctcggccgggtgagacctacaagcccacgtgggtgggtggggggtgggaagtggcttttgagaggggccacctgccagtggtcatagtgactcctgggcttgaaaggacccagttactcctgggtcacacgtgcagggctggggtcaggattggaggggtggggccagttggggatgctgcattagggaaggcgtgtccgccaaccgggctctctggtgttcagcagcgccgaaggtgtcggtggggcccccacgcccaaggggcaggcagcacctccagccccacctctccccagctccttggacccacctcctccaccagcagccgtcgaggtgttccagcggcctcccacgctggaggagttgtccccacccccaccgggtaaggaggtccaccctcttcttcccaaccgtggggtcgcttttctgcctcctgccactccccagcccacctctcttggatctgccccggccagcctcagtgaatgcctcctccaaggagcgcagcacaggggcgaaaggagacagaggaagtgaactaacataacttagcgcctgctgtataccagaccctgtgttcgaagattctcatccattttctcatttgaacttaatcctggccgggcgcggtggctcacccctgtaatcccagcagtttgggtggccgaggcgcgcggatcacctgaggtcgggagttcgagaccagcctgaccaaaatggagaaatccggtctctactaaaaatacaaaattgaccgggcgtggtggcgcaagcctgtaataccagctactcgggaggctgaggcaggagaatcgcttgaacctgggaggcggagtttgcagtgagccgagatcgcgccattgcactccagcctgggcaacaagagcgaaactccatctcaaaataataataataataataataataataataataataataataataaacttaatcctaagggccaggcggggtggctcacggccgtaatcccggcactttggggggctgtggagggcggatcacttgaggtcaggagtttgagaccaacctggccaacatgactaaaaatacaaaaattagcctggcgtggtggtgcgtgcctgtaattccagctactcaggaggctgaggcaggaggatcacttgaacccaggaggcagaggctgcagtgagccgagatcaccacactgcactccagcctgggtgacagagggagattccctctcaaaaaaataaaataaaggccgggtgtggtggctcacgcctgtaatcccagcactttgggaggctgaggtgggcggatcacgaggtcaggagatcgagaccatcctggctaacatggtgaaaccctgtctctactaaaaatacaaaaaaattagccgggcgtggtggcgggcgcctgtagtcccagctactcgggaggctgaggcaggagaatggcgtgaacccgggaggtggggcttgcagtgagccgagatcgtgccactgcaatccagcctgggcgacacagcgagactcggtctcaaaaaaaaataaaacaaaataaacttaatcctgagagggtctttaccactctccgttaacagatgaagccactgacgctgaggttcagtgacttgcccaagagccacccagctaataagaggcagagtctgaccgtcctctactgctggatctttcagggtttactgagcacttaactatgtgctagcagcactgtgggaagaccaggacaggagagggctggaggaagattgcatgaaatgggtgcattctttttttcttttgagatggagtctcactctgtcatccaggctggatggagtgtgttggcaagatctcagctcactgcaacctccacctcctgggttaagccattctcctgcctcagtctcccgagtagctggaattacaggcgtgtgccaccatgcccggctaatttttgtatttttagtagagacagggtttcaccatgttggccaggctggtctcgaactcctggcctcaggtgatctgcccgccttggcctcccaacgtgcctcgctgagatgggtggattctggggtccagctcttgagcagttccctgacacactgaaggagcttcctgtgccacacttacagcctttctgcttttcccccaagacgaagagctgcccctgccactggacctgcctcctcctccacccctggatggagatgaattggggctgcctccacccccaccaggatttgggcctgatgagcccagctgggtgcctgcctcatacttggagaaaggtacctgacttctgggactgaggggcaccggatcccacttcctctgttgccctgatccccattctcctccctctgcaaaggtgtgaatctatcccccgggccccccacacaatttttctgacgaactgacagaactggggagagggcagctggcctggtattaaatattaactaagctggggaggggtcctgaaggcttgcaagaaggcccccaagatggcccctagagtctagtacttgagaccgtgcatccccatggtggtggggggtgagggggagagggcaagaggcattatctcacggcaccctcttctcttgccctgcagtggtgacactgtacccatacaccagccagaaggacaatgagctctccttctctgagggcactgtcatctgtgtcactcgccgctactccgatggctggtgcgagggcgtcagctcagaggggactggattcttccctgggaactatgtggagcccagctgctgacagcccagggctctctgggcagctgatgtctgcactgagtgggtttcatgagccccaagccaaaaccagctccagtcacagctggactgggtctgcccacctcttgggctgtgagctgtgttctgtccttcctcccatcggagggagaaggggtcctggggagagagaatttatccagaggcctgctgcagatggggaagagctggaaaccaagaagtttgtcaacagaggacccctactccatgcaggacagggtctcctgctgcaagtcccaactttgaataaaacagatgatgtcctgtgactgccccacagagataaggggccaggagggattgaaaggcatcccagttctaaggctgctgctaattacagcccccaacctccaacccaccagctgacctagaagcagcatcttcccatttcctcagtacccacaaagtgcagcccacattggaccccagacacccctctgcagccattgactgcaacttgttcttttgcccattgcttgctgtgtgtgtggtgtgttcatatgtggctgggcacttgcccaagagtgggaacgatctccatgacttaagcggggctctccgagagcacctcactgtcaactctgagactgtcgcgagagagatctcagtcatttcttcccccttcacctcctttatagttgtaaaacaccagaggaaggaggggcttgggtttcgctggttctgcttaaaaacatggctttctgttccatggggggtgggggggatgcgtggaaggcccagcccgcgagggtgactttggtgaagtccctggtctcttgctgcatagacgaggctgggatgcaaggagacaccgtcactctctgcgaggttactggctgtccggacccgagccggacggtgcgctacctcgtaccaccaccaggaggcgattgttcctctggcttttcctttgggggtgctagaagggagtgcgggggtcgggaggcaagagagtgtggacagcacagaaatagtgtggggtcgcggtgggtgaagcaagatcgcaaaggcctggggccataggtggagaccctcttctgcctctgtggggagttcttgcggccaggagaatttcaggatcctgggttccctccacagtagactggaggaggggcggtcacgcagcccgaggcaacaagttacagcggcgggagatgttccttctctcacctgccgggggggccccttcctcccagttgggaggaccaggaaatactgctgccttccaaggtttgcgcgccaccccgcgatgggtcagactccagaactcaaccgtgcacagtggagtgggggaggcagccgaggtgggttaactgaatagatagggacggctctgagcccccttccccaagcccccaaatacgagattccagaaattcccagagggacataacaaagccaaagggaaaagggagtagtaaagctgtctttgccgaatctcccttccccgccccctccgccgttggcccgggtacccccctgcaggcggccagactcagcacgacttcagcacctgttgcaggtggaggcgcacatctgcagccgtttcccagggcaccacgctggcgcggaacgagctgggctcggccttctgggcctcctgaatgaggcggtgcatggggtagccgcggcgcgggaaggccacgtcgccgcccgccagcagccccatggggcagaagtcgttggcgccgtcgcccacgtagaagaggcgctcgaagtgcacgccgtcgtgggcccgctcgcgcaggtagtcgctgagcaccttgtgcttgcacatgttggcggggcagcgcgcgcagctgtgtgtgtggaacggccgcagagccagcagtccccgcgcatccggccccgacgggttgctgaggatgcggcggaacaggctgtggtggccggcggcgcgcagcgagctctccacgccaaaggtgttggcatcggagatgagaatcacctcgaagcaggcgccctgttttgccacaaactgcagcaggtcgctcatgcctggcgacaaagggatggcttcgtagatggcgctcaggtcccgcggccgcacgccctgctcgcccaggtacttgaagacgcgctgcatgtactcgttgtagaagccctcgcggtaggtggctcgcaggctctccgggagccgctggcccggcgcggcgcgcacgatcgaatcgtcgctgttttcgtccacgatagtctcgtcgaagtcgaaggtcaggaggaagcgcggcgcgccctgcgcggccatcctgccgtcctgggagcaggggggagagcagcaggaggaggaggaggagggggcaagcgagagggggcgcggcaggagcccgcccgggagaggctggttagcgggccacggccagaggcgctggcacatccaacacctgaggaggacccaagtctggttaagctgggaggagtacccaatgccaccacctctatccccagccttccctgactactccagtggcacctcttagttaactgcagtggggtttatgcccagagggcttctcggcacctgtttcccctactctcatcgagggccaatggggcttaacaagggtcaaaagaagggaagagcagcttccaaggatcaccactttggggaggtttctggactggactgttttggagacttccagtggcccctgttgttggtgtggatcaagaaagggtggtgggaactctcccctccctcattccctgaggtagagtcaagggaaaccaaccacccatccacccaactggaccagtttcctcattctccttttgggccatggggaatctatggctctctgggagctgcttctagcccaatggcactgaacaggggtctagggatggggcacagcttcttcggggagttttagggccctgtgctgacagctcatcactaatcacttgccaattccccaggaggaacgtgtcagcaggtggggtttctgccagagtccgaagcaagcgggcagcaggagaagcagtggggcttggggaggtaagagcctcccgcaccaggccatgacacacctgggagacaggtaagggagaagagaagagagcagcagtggctgaaaaggcagaggagtgggaggggccaggtagtggggacttggggggtgtggaggagagggctgagaggaggtcattctaggggatcttggagacagactgctggacaggaagacagagtaggggtagggataagggagttccaggaagcggagaccttgggccagattcttgttggaggggagggtggtaggcagcatgggagaggacagaggacaagaggggacatgtctgggcacaaggaaaggcaagcaatggaggcagcaagagcccttggcagcaagtttccatcacctttgcctgccagtgtgtgagaggcgcagaggggcagtgagcaggtgacatgcagcttccagatacccacacactgcttttctcccgcccagctcccaccccagttaattgagatgggattgtttctctttctggtttcttcctaagcccctctctcatattcctggtgtgcttatggcctggcacaccttgtgaaacagaaacccaagctcctcatttcggagctgggatttcgattggctatctgcctccctaaccaagctgtcccttccacctcatccctagagtcaccctctggtctcatcaacatccagtgggcatttcagtggcccaggatccttcaaattgcagatataaagcatcaggaccccacacctgggatggaagcttctaggaattaatgaagccccagtagaggtgagggtaaacctaaaacgggctggatagggcctctcccaaggccctatggaaaggtgatgggaaactgggggctgaggcctcatcctaggagacccctggagggacccacttaccctagataggcagcggaggccagaaactggaaaacagccactcattgtcggtgcattaccgtgagcaccacctgtagggactctgttggcctccagccgtcgtcacacgttcctgacaaccacaaaagttcatttgagggtgcccagtcagctgactttgcttccaccaggaatacccacctggccctggtccttctgctgagctacaggaggcattcccagggtcttagcaaaaacaacccctcaaataggcccagtgcctacaactctagagaggtttcagatggtattggagacccagagaagttaactgactttcccaaaagtcacccactgtaaatggcagacagatctcaaacccacatctgagcctgagtccagtgttttttctctagtatcatcattgtcccttaaatgtgtttgacacatcatagtttacaaatcaccttcactcatattctctcactactcatcagtcatgaattcagccaatgagaagggctcagagaggttaactaaccagccacgctgtttacatggggcatagactgcttcatgaacgcttgactgcagctttgccttcctcatgccctcaaaaaggaaggagctgaccaaagcttactataccatagctggggtctgggacccccagccaggtctcacagatgatctgggaatggcctccctgttgctctcaggggtccggcagtcacacagaagagtcaggttgaaatcttggcaagactttggtgtggctttgggaactgggtttaacctcttggggacttcaccaagacagtggcaaaggacaccacctacagcttccagtgcctctctactctcccacctgtgctcctggggttgaatgagaccagaagcagctgggacaagatttggaaagataaagagagccaggagacaagaccttgagagaagcagaggtctggctggctgctgccctctggtggtgacaatggtgacactgtaaacccctctgtcaaggtgacactctcccctgactattcaggagggagaagcaatcgccccaggacagagacggggacatcccaggagcagggtacaggctctagcaatatccatcttgcggtactccctccctcacaacaaccagaccacacatgtgttaaatccttctgcagggatggaatgcggctctcagttttttccaagaacttctaatctaggaattaggagaggtggtcaaagctgaatgaagcagtgggcaaagagagggtgagggatgggagagaagacaggtcaaggaggaggtgggagagaaggggagggttgcatgagggacaaggaaatggcatgggttggagctgtccccagtccctatctggagggacttccaaccttccagattcccagctgatatcacatgtccaacctcagccaggcgatttataagagaaaggtcagggatgccactccccttgtaaaagcaaacatgcagcatctggagaagcaaggggtagatacaaagattccaaggggtcaccaacagctacccagagaccagctttcatcctatagagaagggtctcattactttgcccttccttccttcctgtctctctccttccttccttccttccttccttccttccttccttccttccttccttcctccttccttccttccttccttccttccttttttctattctattgatcattaattatggtcaaaacttctcattttttcagccaggcagggtggcttaagcctgtaatcccaacactttgggaggcgaggcaggcagatcacttaagtctaggagtttgagaccagactgggtgacatggcaaaaccctgtctctttaaaaacaaaaattaaggccgggcgtggtggctcatgcctgtaatcccagcactttgggaggccgaggcaggcgaatcacgaggtcagaagatcgagaccatcctggctaacatggtgaaaccctgtctctactaaaaatacaaaaaattagctgggtgtggtggcgggcgcctgtagtcccagctactcgggaggctgaggcaggagaatggcgtgaacccgggaggcggaacttgcagtgagccgagattgcgccattgcattccagcctgggcgacagcgagactccgtctcaaaaaaaaaaaaaaaaaaaaaaattagctgggtatggtagcttgtgcccatagtcccagctacttgggaggctgaggcacgaggatcacttaaacccaggagacagaggttgcagtgagctgtaatggtaccactgcactccagcctgggtgacagagggagtaaccccatccccaacacacacacacacacacacacacacacaaaactcctcatttctcatcataaaatacagttacatttttctgctaataatagtatctaggggattcagttaaacacttattgtttggtgagttgcccttgtttctttcagtctccaaggcagaaagtcaggcatcttgggtttcttccccagaaaactgagaaggccatgctgtgacacctcgtccccaccccacaggagtcagaggaaccccttccccagttggaatttggctcctgtgatgctccaaaaggtctctcacctctgacacctttgttctgagtcatcaaatccttttgtggtcaccaaacagagtccctcagagtagggggcaggatctgagcttctctcacaggccagagcagggagaagggcttctggggggttgcagggagtccatattctagtcccacctaaaagcagtgcctgcctccttaattctgcaccgggtcacagatccctgcctgcttctcccgcctttcacacaaatgctcttagattaaatctgtgggaagggggtgggagggaaacaggcccctctctgatacaggccctaagtttcaaattcccctcttactgggcagatggagttcctagaaaagttttgggatagttttccaaaggaaatgtgcagaatgaggatggggaggcgaggactccagaaagaccacagtaacaagccctctctgtccaaaaacaagtctccttgtatcaatcactagaaatcagatccaacaactaagctagaattccctccctttcccagacagtgctcccaaacatgaccatcttccttgctcaccacgcccgagcagcagataggaaaaacagaggcccagagaggtcaggctaacatcctaggggtcacacagcatcggaaccgcgattagaactcaggagtctctggcgcctcttgggagaattgcagctggagctccccccttggccctggagactccagtgggcagggagcttgcggtcctgaccagctggcggtggtggccctgcgccctggtgccagtgaggcgtctgggtctagcagtcacctctgggcactccctgggtgggaggacaagctgggaggggatcctaggggcaggggcaggggcagggaggtggcagctgccggtagggttgggggagagatatttttagaggtgactaggaagccagcactctggcgcacccccggctggcgggcgctgggctccaatgcgggcggggggtgcgcggctcggggaggggtattgtgggtggcagggagcaaggggacaccaattccttggctttgtcagagtcggggacggagggataccccagcactatgttcctgggtaggagagagaaggggactcactcctgagctccagaactcccccagtgccacgcgcgtgaaggagcgccttcaaactccacagcccccaccccgcgccgggaccccagccctcccctatctcccggagcccaggactcacgtgggggcggcggcagcagaggtctgtcccggctgagtttggagtgtaagaagtggggaagggggctagctgaggtattggggcgcaggatggagcaaggggtgcttacgggaattggaggggacgcggtgtcttatccacccccggatttctgggctccggctcacgagtccctccagtcccgagggactgaggatgatgtgcgtctgagccgtcccctccacttgcccctcatcccccccgggcagccgccgcgtcccctttaaatgcccgggagccggagccggagccggagccgcggccggcgctgcggctgctgcagcagcggagcccaccgcagtccccaacgtcacaagcgactgtccaatcgcagcggtgccggcgcacatcaaaggggcgggccgcccgaggccacgcctccctcctgccccggaggctccgggagcgccagctaaggtgggattaggctctcggggaaagggtagcagggtggggatggagcgctgcccttccgaggaacgtgggtgggggcaccctcactagagcggctgtggacatacgctaaatccctgcctacacacccaaaattgctagggctgtggactttctcatccgccgcctccagggcttcggttcttgagatttgcagaagtgcacctccacctcctgcccattccgctgtcgcgtcctaaacccagtgggaggcacgggatgacccagccctcgggacccttttccccagattataggttactgaggattgcgggggttggcgggaggaatgactccctacccccacccccgcccgtaaagttggtggagcgggtggtgacagacagtttgccccttttgcagatggccctataaataaaaaacgcactttctcccctgcttcctaagagtgtgtttctcccccaccctaatctcctccttttggccctcaaagcctgctagtgaagagaaggagagaagatagtgtttcgagaggaaagacgtgaaactagtatttactgagaacatactatgaaccgggcattcgagctaggtcgctgcgtttatggctgaatgttcacaacactcgagaaattatttgcctagccgttcaaacccggacacacctgactccattgggtcacaaaggggtgtgtaggtggggagaatgcactttgggaggccaaggtgggaggatcgcttgagccccggagttcgagaccagcctggacaacatagggagaccccatctctacaaaaaattaagaaattagctaggcattgtggcatgtacctgtagtcccagctctactcgggaggctgaggtgggaggatagcttgagcctgggaggtgaaggctgcagtaaactgtgatcacaccaccacactctagcctaggcgaaagagtgagaccctgtctcaaaacaaaacaaaataaaacaacaacaaaaaagagtgagcttgtctggggtcacccagctggtagggctggggtatcatactgtccctctcattgtctgtcatccctcctctcctgtaagcaacatgaggaccatgtttgtcttattgatgtacccccatcccctagcataggcagcctggctggtgcacagtgggccttatagatgtttgttgagtgaggccaggtgcagtggctcatgcctgtaatctcagcactttgggaggctgaggcgggtggatcattagaggtcaggagtttgagaccagcctggccaacatggtgaaaccccatcactactaaaaatagaaaaaaaaaaaaaatagccaggcatggtggcatgcactggtaatcccagctactcgggaggctgaggcaggagaatcacttgaacccgggaggcagaggttgcagtgagccaagatcatgctgcactccagcctgggcgacagagcaacactccatctcaaaaaaaaaaaaaaaaaaaaaaaaaaagatgttgaatgaaacaagtcccctgctgtgtttagctctaggttagtgctccatttgtgttccttcactttgtcttcacaataacagattgttccagtgttatccccatgttattttattttatttatttttgagacagagtctcgctgtgtctcccaggctggagtgcagtggcgtgatctcggctcactgcaacctctgcctcttgggttcaagcgattctcctgcctcagtctcccaagtagctgggattacgggcacctgctcccatgcccagctaatttttgtgtttttagtagagacggggttttaccatgttggccaggctggtcttgaactcctgacctcaggtgttcaacactccttggcctaccaaaatgttgggatgttgggattacaggtgtgagccactgtgtccagcctatccatcccctccccctcctctttttttttttttttttttttgagatggagttttgctcttgttgcccaggctggagtgcaatggcgcgatctccggctcaccacaacctcggcctccctggttcaaatgattctcctgcctcggcctccggaatagctgggattacaggcatgtgccaccacacccagttaattttgtatttttagtacatgttggtcaggttggtttcaaactcacagcctcaggtgatccacccaccttggcctcccaaagtgctgggattacaggcgtgagccaccacacccagtttatccatccccattttataaagaaattgagactcagagataaaaggacttgttcaaggtcacacaagtgccctggaggcaactgattcaaatcctaaccttttgaggcaattagcagcagtttcagcctggtttcctaattcactgatggggttagggagggtaggcagataacttcctttggccactggtggcttcaagtttttactgcggagttctgccttcagccaggtggtgggagtgccaaagctcgtgggtgctacctagaaaccgcctttgtgaaaaagctgtagaaactcctaaaagccagctgggcgtggtggctcacgcctgtaatcccagcactttgggaggccaaggtgggcggatcttgaggtcaggagttcaagaccagcctggccaacatggtgaaacctcgtctctactaaaaatacaaaaattagctgggcatagtgtcatgcacctataatcccagctatttgggaggctgaggcaggagaattgcttgaacctgggaggcggaggttgcagtgagcagagatcatgccactgcactccagtctgggcaacagagcaagactccgtctcaggggggaaaaaaacccaaaaaaactcctaaatgccaaaagcatcaggacacaattctacctctctttcagctttctttactttcccttttccttgtaccagtgagttggatgatcagtcaggtacctaaacatggggatagaaagggaatgggaaacccatcccccattcggttaagacctctgcccagcacatgggctgtagatcctcttctcctcatgtgagtttcaccttaggactcaagtcagccaacctggcagagatcttgtgaacaggagtcatcttaggtgacagtgtaaccgcccaaggggttcgccttgtctgctgcctaggatagccgatttatcaagacagggtaattgtaatagagaaagaataattcatgcagagccagctgtgctggagactggagttttattattactcaaatcagtctccctcaaaactcttttattattactcaaatctgtctccccaaaaactcggggatccgagtttttaaggataatttggtgggtagtggccagtgaatcgggagtgctgattggttggctcagggatgaaatcatagggagtggaagctgttctcttctgctgagtcagttcctgggtggggggccacagaactggttggcaggtccaggtggggccctctggttgttagaaatggaaaaacctgaaaagacatctcgaaaggccgatcttaggttcacaatagtgatgttaccttcaagagtaatttagggaagttgcaaatcttataacctccggaataatggctggtaatatttagaattccagcccctttcatcttgacttggtggctggtggcctttcattagttttaccagaacagtttagccatttgggaagggctattatataaactatacactaaatttctttccaaagctagttcggcctacgcttaggaatgaacaaggacagttgagaagttagaaacaagatggggtcagttaggtctgatatcttttactatcataattttctcagttatgatttttgcaaaggtggtttcaatagggctcacttgagttcctggtgaaccctgactcaggctgccagggacagctcaatccacctggtcttcaaaagagggtgtgtcacttgcccaaggtttcagtgttagagccaaagaggccaagagtccaagaatgtggcctcgtgctctccagctggcctccttcctggtggtgggagatgcaaaggtgggagggaggggcagatgggcatgagttcaacccgcacactccacctgggaaggatgaacgagttttgggaatcaactaggtaccaggcacatgatccccccaccaccctggaaatagggtttaagcgcagcattcccattttcttttttcttttttttgagacggagtctctttctgtcgcccaggctggagtgcagtggcacgatctccgctcactgcaagctccgcctcccgggttcacgccattctcctgcctcagcctcccaagtagctgggactacaggcggccgccaccacgcccggctaattttttgtattttttagtagagacggggtttcaccgtgttagccaggatggtctcggtctcctgacctcgtgattcgcccgcctcggcctcccaaagtgctgagattacaggcgtgagccaccgcgcccggccagcattcccattttcacacatgaaaaaagcagaagctctgggacattaagaaagcgccttgcggggagcagggaggaggggccaaggttgaaaacccatgtattgggtactgtgtgctcacttcctgagtgacaggtttagtcatactccagacctcagcataacacaatatagctatgtgttgttgttgtttgttgttgttgttgctgtttttgagacagagtctcgctcagttcccaggctggagtgcagtggggtgatctcagctccctatatacctttataatctgcatgtgtatccctggaatctaaaataaaagctgaaagacaaaaacaaacaaacaaaaaacaaagaaagcgtcttgcccaagggctccgtgtggcaagtggtggtcaggctggatggtgggtgcaggtctgcactgctctatctgccccccaaaagcagaaggacagggccctcagtgatctgaggactgatgagggtgggctcaggaggaagaggccaccgagggtgtcctcgtgctggcaattctgcaagatgtgttgcagggcattctgcgactaaaaccttgtgctgggggttagtgaccagggctgactagacccctttcttggcttcacagttcccttccaagacaacgaaaagcacatactgcatgctcagcactaagaggctccacttacttcattctcacatcagccctgtaatctactcattctcccattttacagatgagaaacaggaggaacaggatgtatgtaacttgcccaaggtcacagagccaagaggtggctgaagccagacttgaacccaggcattcagctaagaaactgcattcttaagcaaaacatcacaagacctgctctagagaaagtgttcctgcctcctgctaggcaaggtgatgccctaggggaaaggaaggaggagaaaggtttgtgttcttaaattaagtattttctttagggatcgcaccttttgacctactaaggttgagaattccttgagttttggcttagagaacagtctgacttgcaatcagggtagctgagtttgaacttgtgtgacttgaaacaagatgctcttgtttgtgttatttgtttatttagacagagtctcactctgtcacccaggctggagtgcagtggcgtgatcctggctcattgcaacctccgcctcccaggttcaagccattctcatgtctcagcctcctgagtagctgggattacaggggtgcaccaccacacccagctaatttttgtatatatatatatatatatatatatatatatatatatatatatattttagtagagatgaggtttcatgtgttggccaggctggtcttgaacccctgaactcaggtgacccgcttgactcggcctcccaaagtgctgggattacaggtgtgagccaccacacccagccatagacaagttgctcccctttggacctcatctccctacttgggcagaagcttgtcaagatctgactggttttgaggatcctttgttatttaaagagactagagagggagtcttggttggctccccctgctccacagcatagtagaagcaaaactgcctccaagaaccctcatttccaaaccagagctagcctgagcgtttcctctcctcagagccccagaagaggtccaaagggcaaggctagagcagggacaggggctagagggatctcaggaagtacaggaggagctgggggcagaaacatctctgctcccttctctgcacaggcagcagcctgcctggtcacctgggtccccagcccaaggacggctctgtaataaacacttttgaaatattctggcctgtgtcctagagttcactcaaacgcgcagaaacctgtctgcttcccctgtggcactcgggcattcaccaaatctgcctcccatccacttccccctagagtaaggcttagttttattttccaaccctgggctgtgaattggtcctccaaagtctagtaactggctcacgtatcaccctgtggctctggctagcctgctaaacctgagttttgaattgacctttaattgctctaaatgtgctaccccaccccaccccatcctgggaagattcgggcaatgatatagatcaaggcttagatcttttttttcttttttctttttttttgagatggagtctcgctcttgtccctcaggctggagtgcagtggtgcaatcttggctcactgcaacctctgcctcctgggttcaagtgattctcctgcctcagcctcctgagtagctgggattacaggtgcctgccaccaggcctggctaattttttttatttttagtagagatggggttttgccatgttggccaggcttgtcttgaactcctgacctcaagtgatctgcccaccttggcctcccaaagtgctgggattataggtgtgagccatccacccagccaaggctcagatctttggagccagatcctgcaggtagtggtggacagtctatattctcctgccctcccaggcatccctgcaacatggcattcatttgcttgtgctctcattcattcaatgaatataatgaaattaactgcatccggccctgggaaatatgatattgaacaagacatagatcctgccctctaggagccttttttttttttctttttttttttctgacaggatctcactctgttgcccaggctggagttcagaggcgcgtgcagtcatggctcactgcagcctcgaaagactcaagctattctcatacctcggcctcccgagtagctgggactacagatgtgcatcactatgtctgataaaaatttgtttgtattttttgtagatggggtttcgccatgttgcccaggatgatcttgaactcccaggctcctcctaccttggcctcccaaagtgctgagattacaggtgtgagccaccttgcctggcctcagaagtttatagtctagagaagagacctggcaagcaaacagccctttccaaacaagcgtgaggggcttccaaacaagccctttccaaacaactggcagatctgctgtgcccaccaggggaattctgtcctgtctcatcttttttttttttttttttgagacagaatctcactccgtcgcccaggctggagtgcagtggcgcaatcttggctcactgcaatctccgcctcctgggttcaagcaattctcatgcctcaccttcccgagtagctgggattacaggtgcccaccatcatgcccagctaatttttgtatttttagtagagacagggtttcaccatgttggccaggctggtctctaactcctgaccttaggtgatctgcctgccttggcctcccaaagtgctgggattacaggcgtgagccaccgcacctggattgtcccatccacttcttgttattggttgctgtgggcggtcccctcctctcacccctccacctgcccttggcagcttagagatgataccccatctacatccctccttccctgccttccccaatcccaggcccctctccctacaacagactcaccctgacagagctgtccactgtcctcctcacttagcagcaataatggggggaccatggcaggggaaacaggacagagaagtgagtgaacaaacaaacgaacccattttctgtcatccagcagatacccacaacaggtgaaggagagaaagcagtcccacagacacccttctctgctggaaagtccttcctatctgactccagtcccacttgctggaggagttcccctcattttgtttctgagacagccttcttctgtgtaacaactattcagagacttgaaatctgcctctctggtttcttctgtctttgcaaatgtcacattaaagagaacaaggtaacttggtctctgcctgccttgtgttaattctctaaccatgtctgtgtcccagtccccctcactctgccctttaaccacacacgccttctttccaattttattttatttttttttttgagactgagtctcactctattgcccaggctggagtgcagcggcgcgatctcggctcactgcaacctccacctcccaagttcaagcgattctcctgcctcagcctctcgtgtagctgggattacaggtgcccatgaccatgcctggctaatttctgtatttttagtagagacagggttttatcatgttggccaggtgggtctcaaactcctgacctcaagtgatccacccgcctcggcctcccaaagtgctgggattaaaggcgtgagccaccatgcccagcctctttcctagtttcaaaagaaaaccacaggccctttgcacttgctatagcctctgcccagggtatttcccaacccatccatggctcctcactgagctcagggctgagctacaaggaagcttgtcctgctctccctgtccctccccaccccaggatcaggagctcccacattacacagctccacagcacctttacacttctcctgggtgattaattaatgtcttcctcctgtcagctttgagaggacagcgatcgcagtagctttgttctcatagaatccccggtgcctagcacaggccttggcccatagtagctgcacagataaatatttgttgcttgaatgtctgtaggattctcaatctagtcaacttgtataggctgttgtcttagacctggaaccagaccaaagcaagctggcccaaccttggttgtgtcctaatttggccatctgactatgaatatgctaacaaatgacaggcttagcctccagcatttcttccattccttccctggagcaagctcccccaccagcaatcttcccagccctaaggcaggtctgtgttgatggggctagaggccagaggactggttgatctgatcactcaattccttctgcctaacttcagaagcttcttccaaaataagagacctttttttttggatttttttttttttaagatggagtcttattctgtcgcccaggctggagtatagtggcacgatctccgctcactgcaacttttgcctcctgggctcaagttattctcctgcctcagcctcctaagtagctgggactacaggtgcgtgacaccacacctgtctatatatatatatatatatatatatatatatatatatatatattttttttttttttttgtatttttagtagagacagggtttcaccatgttggccatggctggtctcgaactcctgacctcaactgatctgcccacctcagccttccaaaatgctgggattataggcatgagccacggctcccagtggagacctttatgtttttaatgggttgtgtagcccacaaaacaccctttgtcattctcactatttttctgataaggaaaatgagacttagggagatgaggtgacaagtccaaggtcatacagttaggaaggtggctaaggcaacacttgaagtcttgtgaaaccagctggttttctgcaggggatgtgccaaccagcaaagattctcagattctgggctttttggcagttgtttgattcttttttttcattcattcattcattcattcattcactaatttgtttaggagatataagctccagtcattgccttcaaggaggccaaagtctcagtttggcattttgaatctaaggtctggtaatggtctgaaatgattgtgtgtgtatatatatatatatatatatatatttatttattttagtggagacggggtttcgccatgttggccaggcttgtcttgaactcctgacctcaagctataaaatgtatatactatattttataaactatatatataaatataaactataaaatatatgtttatgttttattattttttattttattattttttattatagtattatatttatattatttttatatatttatattattatatctgtattttactattatgattatttttgagacggagtcccactctatcgccccggctgcagtgcagtggcacaatctcggctcactgcaacctatgcctcccggtttcaagcaattcttctgcctcagcctcccgagtagctgggattacaggcacctacctgtaaaaagtagcccggctaatttttgtatttttagtagagatgggttttaccaccttggccaggctggtcttgaactcctgacctcttgatccacccgcctaggcctccccaagtgctggcattacaggcatgagccaccacgcccagctgattttatatatattttagtgtttatgtacatatgtgcatttttcttgcaaactttctttttttcttttttaattgcttggcagagcattgaacttgcaaactttcagagggttccatgacaccctgtcccctgacctcccttcattgcaaaaaggttaagaactgctggtataacgaatgctatgcagtgtaaacagatggcagcccatgtactcatcagtatctcctgcctgtttgggtgactgaggccccagcatgtgaccatctctggcccaagtgataacctgggtgtccgcacctcatgacccatccacggcactgctgacctgtgacagctcctctcagaagatcaaacacatagaaatacacacacacacacacacacacacacacacgcacatgcactgactccaacacccccagattcacaactgctcttgaatccagagagatcctgtaaccatctaatgggttcgccttgcccattgcctagacagagccgattcctcaaaacagggaaattgcaataaggaaagagtaatccacacagagacagttatgcaggagaccggagtttcattattactcaaatcagtctccttgagcatttggggagcagagtttttaaggacaacttttgagggggggttgcgggggtgaagccagtgagccaggagtgctgattggtcagggatgaaatcataggcagtcgaagctgtcttcttgctcttagtcagttccccaatgggggccacaagatcagatgagctcatttatctacctgggtggtgccagctgatccatcaagtgcagggtctgcaaagtatctcaagcactgatcttaggagcagtttagggagggtcagaactttgtagcctccagcggcatgactcctgaaccataatttctaatctcgtggctaatgttagtcctacaaaggcaatctagtccccaagcaagaaggagatctgctttgggaaagggctgttatcatctttgttttcaactataaactatgaactgagtttctcccaaagttagttcagcctatgcccaggaatgaacaaggacagcttggaggttagaagcaagatggagttggccgggcgcggtggctcacgcctgtaatcccagcactttgggaggccgaggcgggtggatcacctgaggtggggagttcgagaccagcttgaccaacatggagaaaccccatctctactaaaaatacaaaattagccgagatcgcaccattgcactccaatctggacaaaacaagagcgaaactccatctcaaaaaaaaaaaaaaaaaaaagagcaaggtagagttgagtaatttagatctcttttactgtttcagtcataattttgcaaatgctcttccattcccttgatctttctctttctctgcagtgttagtgacacatagcactgcccatgatggctatatatatatatatatatattttttttttttttttgagtcggagtcttgctgtgttacccaggctggagtgcagtggcatgatctcggctcactgcaacctcccttctgggtcaagggattctcttgtctcagccttctgagtagctgggactacaggttcatcccaccatgcctggctagtttttgtatttttagtagagattagagatgaggtttcaccattttggccaggctggttttgaactcctgacctcaagtgatctgcctgccttggcctcccaaagtgctcggaatacaggcatgagccactgtgcccagcccgtgatggctacatattgaaggcttgtgtgtgtcagatcctatgatccttacaccttcatgtcttattttttctatttctttttttttttaaattaagagtgtccatactagtactaacttgctctcaagtttctaaatgtttttttgtttgtttttcttttgagacagagtctcactctgtcgcccaggttggagtgcagtggtgcgttggtggctcactgcaacctctgcctcctgggttgaagcaattctcccatttcagcctttgagtagctaggactacaggtgaacgccaccatgcccagctaatttttttgaatttttagtagagacaggtttccccatgttagccaggctggtctctaactcctggcctcaagtaattcacctgtcttggcctcccaaagtgctgggattacctgtatgaaccaccaagcctgggctctcgtgtcttttatatatatatattttttgagatggagttttgctcttgttgcctaggctggagtgcaatggcacaatctcagctcactgcaatctccacctcccgggttcaagctattctcccgcctcagcctctcaagtagctggcgattacaggcatgcaccaccatgcctggctatttttgtatttttggtggagacggggtttcaccatgttggttagactggtcttgaactcctgacctcaggtgatgtgcccgcctcggcctcctaaagtgctgggattacagccctgagccacaacgaccagccccctcatgtcttttaatccccacaacaggcctgtgaggtttggaacttgccccattcacatggctgggaagagatggaggtgaataagagagcattgtgggggtcagtggggggtgtgaagaaacctgaatgtgtttaagatccttcagggatggacccgactattcactgtgccaaaatcattcttgtcttcattctttcattctaccgctatttcttgtttttgtttttgttttgttttgttttgtttttgagacagagtcttgctctgttgcccaggctggagtgcaatggcacgatctcggctcactgcaacctctgcctcccgggttcaaatgattctcctgcctcagcctcccgagtagctaggattacaggcgcatgccaccatgcctggctaatttttttgcatttttagtagagatggggtttcaccatgttggccaggctggtctcaaacttctgaccccaagtgatccgcccgccttggcctcccaaagtgctgggattacaggtgtgagccaccgtacctggcaatatttcttgagaatcttctaagtgccaggtatgtgttggggactgtggtgaccagcttccaagatagcctgatgttgcccacctcctgatgtctgcacccttgggtagtcccctgccagcaggaccaggaagcaaaggaccatcacttccaacattaggttatgagagactgcggctcctgccttggatgctctctcactctcttgccctccctcttctttgcttgcccgctctggggcaaacaagctgccacagtgtaagcagccctatagagagacccacatgggaaggagccaaagcccctgccaatagccagtgaggaacttgggtctgccaagcaccacatgggtgaccctggacacagcctggtcaggctccagccctggtcaggtcaacgtgtgagcctggacacagccaggtcaaccctccagccctggtcaggccttgagatgactgcaacctcatgaggaccctgcttgcagaaactgggagacaataaatgcttagtgttgtaggctgctaagttatgagggtaattcgttacacagaaatagaaaactagccaggtgtggtcgctcgtgcctgtgagttcccaaatcccagcactttgagagactgaggctagaggatcacttaagcccaggagcttgagaccaggttgggcaacatagtgagaccctccatctctgtaaaaaaatttttttaaaattaggagggcagaccggacacagtggctcacgcctgtaaccccagcactttgggaggccgaggcgagtggatcacctgaggtcaggaggttgagaccagcctggccaacatggtgaaacctcgtctttactgaaaatacaaaatttagctgggtgtggtggcaggctacccaggaggctgaggcaggagaatcacttgaacccaggaggtggagctcacgccactgcactccagcctgggcgacaagagcaaaactctgtctcaaaaagaaaaaaaagaaaagaaaaagaaaaagaactaaatcagggatatatcagtaaacaaaattgacagggctcttacattctatggaggacgcagacagtaaacacaagaattaagtttaaaaaaaaacctggccgggtgcggtggctcacgcctgtaatcccagcactttgggaggccgaggtgggcagatcacctgaggtcaggagtttgagaccaacctgacccaacgtggagaaaccccatctctactaaaaatacaaaattagccaggcatggtggtgcatgcctgtaatccgggaaactgaggcaggagaatcacttgaacccgggaggcagaggttgcggtgagccaagattacgccattgcactccagcctgggcaacaagagcaaaactccatctcaaaaaatcaaaacaaaacccttgaccaggcacagtggctcacgcctgtaatcccaacactttgggaggctgaggcaggaagatcaggtcaggagtttaagaccagcctggccaacatggtgaaatccaatctctactaaaaatacgaaaattagcatacaaaaattagctgggcgttgtggcaggcatctgtaatcccagctacttaggaggctgaggtaggagaattgcttcaacctgggaggcggaggttgcagtgagccgagatcacgccacttcactccagcctgggtgacacagcaagactccatcttggaaaaaaaaaaacaaacaaaccccacaaaaatcccagtgtattagagagcagtaagtgctttggagaaaattaaagcagggaaatggggtagacatgagagaggctttatttatttatttattgttttttttgagacagggtcttactttgtcacccaggctgaagtgcagtggctgaatcttggctcactgcaccctccacctcccaggcttaagccatcctctcctgcctcagctccccaaatatctgggactgcaggcacacgccaccatgcggagcgaattttttatttatttttatctttattttttgagatggaatcttactcagttgcccaggctggagtgcagtggtgcaatcttggctcactgcaacctctgcctcccaggttcaagtgattctcctgcctcagcctcctgagtagctggcaccacaggaattgcaatttgcatgcaggaatactgacatttcagaggtcttccaatagttattgggataaccggtaaacaatctaactccagcttagtggctgtagttgtaggttgttatttctggtttccctctttggagcaagcaacatacaaagtgtgtctccatagcacagcagaaaatgccaaaataaggacttgacctgtccatttggcttgtctttcctcctggtaacagacttgttgctcataagtgacccacggcctgaggacgccctcctcctatgcccttctccccctcaacccaaggatgcctgctttgtcctagagtgcatccttagagcctgctggggctccccgccagcagacccatggccatagctaccatattgaccaaatcaagatggacagacagtgcagcaagcctgaagttatacttagaggatgaagggacatctgggctttcctagaaaatggaaggcatggccgggcgtggtggctcacgcctgtaatcccagcactttgggaggctgaggtggtggatcacttgaggtcaggagttcaagaccagcctgaccaatatggtgaaatcctgtctctactaaaaatacaaaaattagccaggcgtggtggtgcatgcctgtaatcccagccactagggaggctgaggcaggagaattgcatgaacccaggagatggaggttgcagtgagccaagatcacaccactgcactccaacctgggtgacaaagcaagactccatctcaaaaaaaagaaaaaaaaagaaaatggaaggcatggccgggttctgtggctcacacctgtaagcccagcactttgggaggctgaggcgggcagatcacttggggtcaagaccagcctggctaacatggcgagaccccgtctctactaaaaatacaaaaattagccgggcggggtggcgcatgtctgtagtcccagctactcaggaggctgagtcaggagagtcacttgaacccaggaggcagaggttgcagtgagccgagattgtgtcactatactccagcctgagtgacagagggagactctgcctcaaaaaacaaacaaacaaaaaagaaaatggaaggcacaaagtagtcaaatacctctcaagacacccatacatcctggagggccagaggagtcattcatgtattcatttgcacattcttccaacaaatatatttggaaaacctactgtgtgccaggaccaggctagcgactaaaaaataacgataagaggaagcttcggccctgggagcacttatagctggcagcaagtagaccagtgcacagacaagggcgtggtgcttctggtgaactcaggagggacacccatcccagtccaaagggaggaccagggagggagtgtctgtgatgtcacaggagggttccatgagcaataacttataagctgagacctgcaggatgaacaggagttaggtgaagaggagaacgatgtccaggcaggggccggggaagctcgtgccaaggcactgaggtgagagaagtggtagaaaaggcagagcttggagggtcttttgagcttcatctgtaagggctgtggggaaacactgaaggtttggagtcagggagtgacacaatctcatttgcattttattttattttgattttgatttttttgagtcggagtctccctctgtcacccaagctggagtgcagtagaagcaggatctcagctcactgcagcctccgcctcctgggttcaagtgatcctcctgcctcagcctcccaagtagctgagattacaggtgcctgccaccacgccaggctaatttgtttgtatttttagtagagatgggatttcaccacattgcccaggctgctcttgaactcctgacctcaagtgatccacccacctcggcctcccaaagtgctaggattacaggtgtgagccaccgcacctggcctatgttttattttattttattttggagacagggtctggctctgttgcccaagttggagtgcggtggcatgatctcagctcactgcagccttgacctccctggctcaagcagtcttctcacctcagcctcccaagtagctaggtctaattggtcaccatacccagctaatttttaatttttttttgtagagatggagtcttgctatgttgcccaggctggtcttgaactcctggtcccaagagatgctctccccttagcctccccaggcacatttgcattttagaaacattggcatatttgcattttagaaacatcggcacatttgcattttagaaacatcacttttgttgctattattgataccctcaacacacagacacacacacacattttgtggcctgtggctgaacatgcatggctgaggcaggggcctttagggagaccatagccccggctgacccagtccccagggtgttgggggaataatgacagcctatcctcttctctgcaccccaccccatccagcagacttcagggtcaggttctgagggctgctatattgggctttggtgggtgagggctttatcccacctctgtctgcattgggtcagcttctccctgggatggagggattcgttgtatcttcagggtggcagggcctcctccccagagccacagtgcccaagataacagggcagcccgggagctgtttatgaaaaggcaggcaaggaggggtgggcagggccctggggaacagggactgctgtcacagatagcaattggggcggagaaggctgtctaaattacagctcccagaatagaggggcccagagggagtggcggggcgtcctaccaaagaagccctggaagcctgccaggcatgtccgggctccaggccctgccgcaggcagaggcaggatgaccacatgccgggtgcggccccaggagatgcaattcatctgccagggccaccgggcagcttcaaggtggggccaggcagtggcagggagtttcttgggggctgggagagaaccagcctagtgtgaccttcaagaaaggttgagggtggtgaggggagggaagggctaggatgagggttggctgacatcttgcctgcccccagaggagactctccattacacgcctctgtggatatttcatagaagtgtgaaatactctgaaaataacaagaatgacaggcatacaaaataacaagaatgacaagcagccgtgtgtcaggcagcactctcaacaataacatacatcacttcagttcaccctcccagctcccacgagttagttattatcatccccattttatagatgtagaaaccgaggcaccaagaggtcaagtacttgccaaggagaattggtgagtggtagacctaggacttgaacctgggtgtgtctgactctagagcctagactcagtcagggaatctatttggagcccttctcctccctggggctcagttttctcatctctcacatgggatcatagtctgttgctctgtaccagcctcccaagagctgtgtcagaatcacatggggacaggtgtgatgtgctgggaagagcgtcaagcacgaaggcctgcctgaactatgtgacttatccgctctaagcctgtttcctcgctcgcaaaatggagataattggtcaggtgtggtggctcacgcctgtcatcccagcactttgggaggccgaggcaggagaattgcttgagcccaggagttggagaccagcctgggcaacgtggcgagaccccatctctaccaaaaattaaaaaaattagccaggtgtggtggtgcgcacctgtagtcccaggaggctgaggcaggaggatctcttgaggtctaggctgcaatgagtgaaggttgcaccactgcactccggcccaggcaacagagcaagaccctgtctctaaaataaacaaaaagctccagcctgggcaacagagcaagaccctgtctctaaaaaaaaaaaaaaaaaaaaaagccggggagggggtataatgatagatacctcataggttcctctgataatctgatgagatgatcagctgggtttggtgactcacgcctgtaatcccagcactttgggaggctgaggtgggtggatcacttgaggtcaggagttccagaccagccggaccaacatggtaaaatctcatctctactaaaaatacaaaaattagcagggtgtggtggtcacgcctttaatcccagctacttgggaggctgaggcaggagaattgcttgaaactggggaggtggaggttgcagtgagccaagattgtgccactgcattccagcctgagcgacagagtgagactcaaaaaaaaaaaaaaaaatctgatgagattttatatgtgtgaaagtattcctgtatttgaaggtagttttataaatcagaaagtgtaacatttcaagttatgaggaaactgaatatttataaaggcaatgattccagttcacaagggaaactcacctgtgtctccaaggagcatccctctttctaatgaagaattaccccctttattgtttattcttgggagagattcagtttttctataaggaatggcttaaagcaaggcacgcctacattcattttctgtgaggatttgctgctttgaaactgtcttttatcacctgcttgtagctaaaatgctgatttccttttttttttttttttttgagacggagtcttgctctgtcgcccaggctggagtgcagtggcaccatcttggctcactgccagctccgcctcccgggttcacgccattctcctgcctcaggctcccgagtagctgggactacaggcacccgccaccaggcccggctaattttttgtattttttgtatttttagtagagatggagtttcaccgtgttagccaggatggtctcggtctcctgaccttgtgatccgcccacctcggcctcccaaagtgctgggattacaggcatgagccaccgcgcccggctaaaatgctgattttcagctgaggctagggaagccccacctcagttcccagccccatctgtttcctggactgtagggttccatacagagacaagttcagtccagatgacccttatccccaggctgcaagctggctttcccagcctccttccctaccagatgtattatttatttatttatttgtttgtttgtttatttatttgagacagagcctggctgtgtcgcccaggctggagtgttgtggcgcaatctcggctcactgcaaactttgcctcccaggttcaagagcttctcctgcctcagcctcctgagtagctgggattacaggcgtgcaccaccacgcctggctaatttttgtatttttagtagagacagagtttcagcatgttggccaggctggtctcaaactcctgacctcaggtgatccgcccgccttgacctcccaaagtgctgggattataggcttgagccaccgcgcctgctccagatgtattacttaatgtcctgcaacatcctctaatctgcctccaggggaagtgctgcaatgaacctcagaggctggatcttgctgactcatctggggtaccaaggacagacaaaggacatggagtccaggcccaggaggcgataccaggccagcagtttcactgatgctcctgtcatgacgatgactgcctccctcctccccttggtccctgactcagtgtctgcagtgaccaggcaccaggcagggagcaaggaaccaagcctttcacctgctcccaccaactcctatggtgctccctttccaaggctaggtctcctctccacccagttccttatcacgtaccatgagaagctgtcaccttggcaactgtcaccttctggtgagatttacaattgcactgctacaactgcttgtggcatggtaaagttgcaccaggacctctgctgtccatgagatcaaagttccaggccaaggtgagcacccgcctccatcctagagaggattctgtgagaatcattgagagggagctactctctccaggcaatcacgggggtgagaaagaaaaaaaaaaagagagggagttactcatgtactgacttattcaatgaatgcttatgttgtaatacctactatgtgtctggtgctgttctaggcaccaggggcacgaacagtgttgcccgcatggaactcacacttaatgggagcggcagccaacaggtaaatatatagaatgccatatgatgatagatgctatgaagaacataaagaagggaaggtgtgttgagagcggaaagggtgctgtttaacaaagggcagttggagaatgcctccctgatcaggtgttgagcccagtgaaggaaagaaatgagggatccagccatacaagtgcctgggggaagagccttccagcagagagaccagcaagtactcaggtgagagtgatcttggtgtgttcaaacagcagttaggaggccagcgtgaggctgcagtggcgtgagccaggtggagccactcaaaggatagagttgtgatttatggtgaagcgggtttgaaggatggaagtctgctgttagaatcttctttaactttggccggacgcagtggctcatgcctgtaatcccaggactttgggaggccgaggtggctggatcacctgaggtcaggagttcgtgaccagcctggtcagcctggtgaaagcccgtctctaccaaaaatacaaaaattagccagatgtggtggcatgcttgtaatcccagctactcaggttgctgaggcaggagaatcacttgagcacgggaggtggagtttacagtgagctgagatcgcaccattgcactccagccggggcaacaagagtgaaactcggtctcaaaaaaacaaaacaaaacaaaaaaaaacctttctcaactccaacccaagtccctcaagccagttaagctaggattagagttcagggcctgactgggcgtggtggctcatgcctgtaatcctagcactttgggaggccaaggcaggtgaattacttgagcccaagagttcaagaccagcctgggcaatacagcaataccccatttctacaaaaaaatacaaaaattagtcaggcgtggtggcatacacctgtaatcccagctactcaggaggctaaggtagaaagatcacttgagtccatccatttgaggttgcagtgagctgtgatcctgccactacgcaacagagtaagaccctgtcttaaaaaaaaaaaaaaaagttcggggcttcagggcccaatttgctgcttcttcagctctgactgcatctcacagtggccaggcttcccctggaaggcagtgttgcctgcaatttctttctgcccagctctggcctttccccctaaactgatctcccacttcctcacatccctggagacacctgcctgcccatctgcccacttgcctgtgcccctcacttggcagtcagcacacccctgcttaatgtcgttatcacttcacttcctatttatttatttatttttgagatggagttttgctcttcttgcccaggctggagtgcaatggcgccacctcagctcactgcagcctcgaccacctgggctccagcagtcttcccatctcagccttccaagtagctggaaccacgggcaggcactaccatgccaggctaattcttttacttttttcagagatggggtctcactaggttgccagagctggtctcaaacttctgggctcaagagatcctcctgccttggcctctcaaagtgctgggattacaggcgtgagccaccgcgcctggccattatcacttctttttatatcttctctctccagctaaactgagagtaactggcgagtgaggactagttttagatttcttggagtttatagtgcttggcacattagaagtcttgataaatacacttaaagcggtcaggaatgtgaatgttcaaacgaggccaactctttttttttttttttttttttttgagacagagtcttgctgtgtcacccaggccggagtgcactagcacaatctcagctcattgcaacctccatctcccaggttcaagtgattctcctgcctcagcctcccgagtagctgggattacaggcctgtgccactatgctaattttttttttttgtattattagtagagacagggtttcaccatgttagccaggccggtcttgaacttctgacctcaagtgatctgcccacctcggcctcccaaagtgctgggattacaggtgtgagccaccgctcctggctgaggccacctcttttcttggggacacttgggctccagctttctccattcatcagcttagcatgagcttgaggaacgcagaggggggctgactgagaggagcaggcactggggacaatggggacatccacggttcctagcaatggatttgaggtgggatttccaattcctcttctcccaccttggatttgaccatctgaataccaaattcctgtcacttctaggatgtcacctaagatgagactgtggtctttccactcttgggtcccaaggaggtgccacagggcctacaataaggcaaggaaggctcagtgaggtccgtgttcaccccacccccacttcaacacgaggagttctgcttttattttgcctctgtgtgtgtgtgtgtgtgtgtgtgtttctaggtattattttatttggagaaaggatttgctcctaaggacacacacacgcacacacacatgcacactcacgcacacgtactcacaggttctgcaaaacactagtgtggcagaaagtgttgaaaactagttctagacctggcatgaatttgaccaggttcagccttagtctcctctcttagaaataaggtcatctgggccaggtgcggtggctcaagcctgtaatcccagcactttgggaggccgaggtgggcggatcacgagatcaggacctcaagaccagcctgaccaacatggtgaaaccccgtctctactaaaaatacaaaaattagccaggcatggtggcacgtgcctataatcccagctagtctggagggtgaggcaggagaatcgctggaacctgggaggcagaggttgcggcgagccgagatcatgtgaggaaataaggccatctggaaatatccttcccatcacaggatgatacccggcaaattcttcaaagcagtgttctccaacttgaatgtttgtgatgtgggcgattctgactgagggggtctgtagaccacatcttgataaacaatgctttttaaaaaattcctagaagagaatatttgatttctggaaggatagagaagaaactaataagagtgtttacctccgaggaggaggagaattgggaagctgagagcagaggagggaggaagacttacttttcaccgtgttcttttttgtaccttttgagttttgtacgacatactgaatctttgacccatttgcaattataaataaaggcacatttatttggccgggcgcggtggctcatgcctgtaatcccagcactttgggaggacgaggtgggtggatcacctaaggtcaggagttagtgaccagcctggccaacatggtgaaacctcgctctactaaaacacaaaaattagccagatgtggtggcaggcacctgtaatcccagctactcagaaggctgaggcaggagaatcgcttgaacctgggaggcagaggttgcagtgagctgagatcgcacgactgcactccagcctgggcaacagagtgagactctgtctcaaaaaaaaaaaaaaaaaaaagaaaaagaaaataattagccaggcatggtggcaggcgcctataatcccagataggaggctgaggcagaagaactgtttgaacctgggaggcggaggttgcagtgagccaagatcacaccactgcattccagcctgagcaacagagcaagactgtctcaaaaaaaaaaaaaaaagtacatttacttgaaaaaaaataaataactaaaaacatttggcacattattcaaatccaaggtgtaaaaaaacgccacagggcatggtggctcacgcctgtaatcctcgcactttgggaggctgaggcgggtgggtcacctgaggtctggagtttgagaccagcctggccaacatggtgaaaccccatctctactaaaaatacaaaaaaattagccaggcatggtggcaggcacctgtaatcccagctactcgggaggctgaggcaggagaatcatttgaacctgggaggcagacgttgcagtgagccgagatcacaccattgccctccagcctgggcaacaagtgaaactccatctcaaaaaaaaaaaaaaaaaaacccacaaaaaacaaaaaacaacaacaacaaaaaaacaaacaccacaaacatgaccacctgccatgacctccctggactgattgacccacaggaaagccagcaagcttgttcctgaggcctttgggaattgcatgcactgctgcccagctctggtcacacagggtcacccagagactcaaggaaaaaggggaggcgtcacccaatcagtctctccctcaggtgtggcatccaagctggctaaagggtggcaggtcccaaactgtccatgtttctcttacgggagctgccgaagatggcagagatgttaaaacaaaacacaaacaaacaaacccaatacacccaggaggccacctgagctcccacaacgctggctgtataccttataaaaactgcctggatatgttgtgctacctgtgtattcgtctgtgccctacccccacagtgtcaattccaccaaggcagggaccgtgtcttgttcatccttgtgcgtccagtgcctaagcccagccctgtttatgaactggaggcaaacacctttggaaggaaggctactcccagcccctcgccaggcatctgtgttactgtggcttctgctccaccaacgactagcagttcgcagcttctaaacggtgttccctctgttgcagctgagcttcctgcaatcctgtaaaacaggctctattgctattatcaccatcttcattgaaccaatgaagaaagcagtcttgtgtctaccatcttaccatcttgtattttgtggtgtgccattggccacttcacttttttcctttggttttgcacctgtaaaatgggtgccattatttctgacatacccatgagccagaggacatgtcagaatcaaggggtcaaagtggctatgaggccagaagctgtaaagaaggagcagagatcaaatttaaacctagcatctttcctttttttttttttgagatggagtcttgctctgtcgctcaggctggagtgcagtggcacaatcttggctcactgcaacttctgcttcccgggttcaagtgattctcctgcctcagcctcctgagtagctgggattacaggcgtgtgccaccacacccagctgatttttgtatttttagtagagatggggtttcaccatgttggccaggctggtctcaaactcctgacctcaggtgatccacccacctcggcctccgaaagtgctgggattacaggcatgagccaccatgcctggcctttttttttttttgagtcagggtctcactcttgtcacccaggctgagtgcaatggcatgatcacaactcactgcagcctcgatctcacaggctcaagcgattctcccaccttagcctccccagtagctggtaccacaggcaggcaccaccacgcccagctaattttttatttttatttcttagagacgggtctcactatgttgcccaggctggtctcaagttcctggattcaatgttcttgccttggcttctcaaagtaccaggattataggcatgagccactgtgccaggcccaaacctagcttctgagtggaaaaatttctgctgccccaccagcttcaggaagtgggagtcaactctagtcactgtggtgatgcagagataatacggctgataaaccccttatttttctctccttgtttttggtcatcattaggaatttgttgacagagaggggacaggtaaagataccattatacttattattattattatcttgagacagagtctcattctgtctcccaggctggagtgcagtgatgtgatctcatctcactgcaacctccgccctccgggttcaagcagttctcctgcctcagcctcctgagtagctgggactgtagaggcacatgccaccatgcctggctaatttttttgtatttttagtagagatggggtttgactatgttggccaagctggtctcgaactcctgacctcaggtgacccacccacctcggcctcccaaagtgctgggattacgagtgtgagccacggtgccaggccctattatactttgctaaccttttattgtgtacctactatgtacacaggtgctggggaggtgagtaatacagcaaaagaaaaaggttaactccctatgggaggctgttgcctgcagaggatgtatttgaatgggaatcccagaatattcgtgatatagatggggaaactgaggcccagaatggggaaggggcttgcccaaggtacacaaattggaacactcagtggcctttagttagatttctttattacttatttatttttttgagagggagttttgctctatcacccaggctggaggcagtggccttcttggctcaccgcaacttctgcctcccaggttcaagcgatcctcctgcctcagcctcccaagtagtggtaactacaggtgtgcaccaccatgcccagctaatttttgtattttcagtaaagacagcgttcaccatgttggccaggctggtcttgaactcctgacctcaggtgatcacccacctcagtttcccaaactgctgggattataggcgtgagccactgcgtccggccttagttagctttattaatgagaaaacaggagtgctggtccttagcctccagtcctgatggggtgcagcgaggaaatggagctctcactggaagctgtggccctgccaggactacagccctcggttttttgtgttttttatgttttttttttttttttttttttttcacccaggcctgtgcactgaggggtaggggaaaaaggcaggaaggggagggtggagtcacctcgcaaaaggaagccaggggagcccagaacaggatccagggtctccctcccccgtggtctggagatccttgacatctgccatccccttagcagaagctgcagccagagaaagagggcgacggtcccgtcacattctgagcccagcaacggagggctttccaggccgggactgcgggcagatgggaattctcctctcctttctgctggacgtatctcccctcagtttcgctatctgtaagatggggcattgtccctgccaaacccgcaggccaggacggcctaagaggatcaaacgaggagaggcaacgaggattggtgcctggcttttcctgaaaacagattcctcccccgcccccgggacctgtcccacaggggcgtctggaaattccacagagccagccagtctcagagtgaaacaatcggatccgccgcgacacagcagctattcagacgtcgggggcgggggccgggccgctgagcgagcagagcaatgccgccctcgcgtcccctcccggcccacgcggctgccccggccgccctccccgcggagccccggcctcgcacgggcctcggcgcccgccgggcgtcccccaagcttccttgtttgtggccgagcgaccgcggagcgtggcacgttcaggaaggacgagtcgccccacggcggggaaccggcgaccggcggcagccccagcccaaccccggccacgcctcgttaggcgccacgtcccgtccccgggcgcccggagcactgtgccccgccggcccctgcccgccgctcgctgtaggagggagccttctgcgtcggctcccgacactcgctcactggggcgcgggcacttgagagtaggcaacctgggggccccagaaggggatggggctccgacagcttcagccgggcgtcccctcagctgccttagctggcgtctgagagcgactcctccgtccagggctgacagttcccttgccccttaagagccaatcggagaatcataggatctgacatcctgtggctcagccgggtctaagagctcatgagtcaccctgtgtgctttgctgatgaggaaaccgaggcccagagacgggggctgacttattcgagccacgtttgtgtctcctagccctgtgccctttctccaacactctactatcctacctcaaatcaaatccactctggggctaaggacatctagaagtgtgcgtgtgtgtgtgtgtgtgtgtgtgcgcgcgcgccaagagtggcttggctacattagggaaatgccagaaaaatggaaggtttctaataaaagctgctctccacgggcccagagtgtggggctcccacccattggctccacaaatcacctgtacaaccttgccagacattggccgcctggcagctccagacttcactccacccacactccccacacacatacagacaatggcatttttttctatggcatctggaaggggcagaaatgcccagagacctggtttgatcccacttctcttgggcccttctctatgtttctaaaattgctttactgcaggcgcttgggtggctcttgtggtctctacacagatttgttttctccagtgagactcagtcctgtgggtcacccatcaggactacatttccaagggtccttcaggtggctccatgctcctgggtcaaactgttaccagaaaggggtcttgatccaaacctcaagagagtattcttggatctcgtgtaagaaggaattcggggcgagactgtaaagtgaaagcaaatttattaggaaaataaagaaataaaagaatggctactctatagacagagcagccccgagcactgctggttacccatttttatggttatttcttgatgctgtgctaaacaaggggtagattattcgtgcctcccctttttagaccatagagggtaacttcctgacgttgccatggtatttgtaaactgtcatggcgctggtgggagtatagcagtgaggaccaccagaggtcactctcgtggccatcttggttttggtgggttttggccggcttctttaccgcaacctgttttatcagcaaggtctttttttttttttgagatggagtcccgctctgtcacccaggctggagtgcagtggtgccatctcggctcactgcaacctctgcctactgggttcaagtgattctcctgcctcccaagtagctgggattacaggtgtctgccaccacgcctggctactttttgtattttcagtagagacagggtttcaccatgttggccaagctggtctcaaactcctgacctcaggtaatctgcctgccttggcctcccaaagtgctgggattacaggcatgaaccaacgtgcccagccagcaaggtctttgtgacccacatcttgtgccaacctcctatctcatcctgtgacttagaatcttagaatgccttagccatctgggaatgcagcccagtaggtctcagcctcattctacccagcccctattcaagatggagtcaccaatctcggctcactgcaatctccgccttctgggttcacgccattctcctgcctcagcctcccgagtagctgggactacaggcgcccgccaccatgcccggctagttttttgtatttttttagtagagatggggtttcactgtgttagccaggctggtttcgatctcctgacctcgtgatccgcctgccttggcctcccaaagtgctgggattacaggcgtgagccaccacgcctggccaggatcattttttacattcgtggagcactttgtgtcttaagatgtgctttctggttcattatcttctcattctcacaattctgtaatgcaggaagagactgctatctttgtactgggaggcacaatgaggcctctgccctgccacttatcagctgtgtgactttgggccagcacagtgatctttttgggcccctatttgcaaacggtattctctccctgtaaggtggtagaggacactgagatgagctacgtctaaccctcggccccagtagcaggcattcaaaaaacattaacttattttttacagatgaattaggtaaggcctaaaaatacctcatctaccgcagccaatgagaataataaaccccaacctactgctgtgttttttctctgtctttaaaaaacaccccaagctggggccggccactgtggctcacgcctgtaatcccagcactttgggaggccaaggcaggtggatcacttgaggttagggattcaagacaagcctggccaacatagtgaaaccccgtctctattgaaaacacaaaaatcagccaggtgtgatggcaggcgcctgtaatcccagctactcaggaggctgaggcaggagaattgcttgaacctgggcagtggaggttgcagtgagctgaggtcacgccactgcactccagcttgggcgacagagcaagactctgtctcaaaaaaaaaaaaaaaaaaaaaaaaagtaccctaagctggaaagtggcgaagagcgtttgatttgattttctactgtcttataccttgggctgggttcttccactctacccacaggcttttctcagtctgtgtccctcaagttatatttagacatctcttcattcccagtctttatggagggctaatttagccattatccaaacacacagtggcaatgtttcaaaccacatcaaggaggatcctttacttgaaagtccctcaaaactagctcttcctagattcctgctctgccctcaaataaaagagagaggaaatgaccagttgcccccattgtggcagattgtaaaccttagcctagtcaagaccttcttgggtcagaatgactaagggggggatttgagaatactagctgagaacctccatcactcctcaacgtatgcgtggtttagcaaatcactcaccccctcaagatatgttttgcctccatccccattcctttggagaatccctccatcatcttacctatcagagaaacaccaacttatagggacactgtcatgacagaccccaaaatgcttttagatgactgatacatgctcatagaaggaagagaggcacctctaaccccccgccccatcctttctactggacactcacatacccgtgtacaaaatgtatagacataatttctttatgtcccagagccaaactaggttgggacatgtggatcaaacacacttgatatgagggtttgggaatcttgggtctttcatttctctgtgactgaaagtgagatttgggtcatcaatactggaaatgagattggggtcatcatagactcttaggtgaggaaggcgacctttaagatcacccagccccaccgggcgcagtggcttacacctgtaatcgctgcactttgggaggccaaagtgggtgaatcgcctgaggtgaggagttcgagaccagcctgaccaacatggagaaaccctgtctctactaaaaatacaaaattagctgggcgtggtggcacatgcttgcaatcccagctacttgggaggctgaggcaggagaatcgcttgaacccaggaggcggaggttgcggtgagccgagattgtgccattgtactccagcctgggcaacaagagagaaactgtctcaaaaaacaaaaaaagtccaggcgccatggctcatgcctgtaatcccagcactttgggaggccgagatgggtggattacctcaggtcaggagtttgcaaccagcctggccaacatggtgaaatcccgtctctgctaaaatacaaaaattagctgggtgtggtcacaggcgcctgtaatcccagctactcgggaggctgaggaaagagaatcgcttgaacccgggaggcggaggttgcagtgagctgagaccgtgccattgcactgtagcctgggcaaccagagtgaaactctatctcaaagaaaaaaaaaaaaaaaaggaaagaaaaaaaaaatcaccctgccccaccctcttgttttggagagattccataattatttgtttatatattgaatacctgccatgcgccataaatagaaaaatgagatggccaagacaattttcttcccttgagaagctcacaggtctaggagacaaacaagtctgccactagttatatacaatgggataagtaagtactataatgtcagttttgtgcagagtgcaggagtgacagggagaagaggaggggccatctctgcctggggaagaattgaatacacagaggtgatgtgtgagctgggttttgaagggatgctgcatggttggcctagaaaggtgggttgggataaaggttgagttaggacaagaacccagttttctaggcagtgctctccccatacatggccgctatttatttccttccttccttccttccttccttctttccttctttcttttctctttctttctttctttctctttctttcttttttctttctttctttccttcttctttctttctttctttctctttctttcttctttctttctttctttccttccttccttccttccttccttcctttctttctttttctttcgtctttctctctctctctttttctctttctttctttctttcctttctttcttttttttcacggagtctcgctctgtcgcccaggctggagtgcagtggcgccgcgccatctcggctcactgcaagctccacctccggggttcacgccattctcctgcctcagcctcccaagtagctgggactacagatgctgccaccacgcccggctaattttttgtatttttagtagagacggggtttcaccgtgttagccaggatggtctctatctcctgatctcgtgatctgcccatctcggcctcccaaagtgctgggatttggggttacaggtgtgagccactgtgcctggctctttctttctttctttttttttttttgagacggagtttcacttttgtcacccaggctggagtgcaatggcgtgatcttggctccctgcaacctccgcctcccgggttcaagcaattctcctgtctcagcctcccaagtaactgggattacaggcatctgccaccacacctggctaatttttgtatttttagtagagatggggtttcaccatgttggccaggctggttttgaactcctgacctcaggtgatctgcccgcttcggcctcccgaagtgctgggattacaggtgtgagccactgtgcccagccccctatttcttttttgtttttggagatggagtcttgctctgtcgcccaggctggagtgcagtggcgtgatctcggctcactccaaccgcctcccagtttcaagtgatcctcctgcctcagcctcctaagtagctgggactatgggcacatgtcaccatgcccggctaatttttgtatttttagtagagacagggtttcatcatgttggccagtctggtctcgaattcctgacctcagacctcagatgatccacccacctcagccttccaaagtgctgggattacaggcataagccaccatgcccagccaatacatggcccctatttctatcaccttgagatgacttgctggggaagctgaagacctgattttccagctgcctgaaggtagtgggctgggagttgtgtccctatgcagcagtctaggaagggccattattatgttcagacttgacggagcatccatcagcaggaccagacctgcctgggcagtagagggaggaaatgagagacaacctctcaggcagatacaccgtgctagacagcagcagtgaagatgtgaatccttcaaatcttggcatagcctggagggaaaccagggtctaattggtctagttgttccatttatctgggcaaggagaggagaggtactttccacttctcactctgtttgtaggcaccataagtatttagcctgatgagtctgaacatttgcttcttgattatgtgtgtgtggcctacccactagtgaagaaactgcttcccagacttcctggtctctgccatctggcatggggtgctcagaggaagccagtgtctcagcacaagacaaacccaacttaggatggaaacttgctacattcaacatgcaattaaagaacaaatatcccacaaaaatgaatgtggggccaggcacggtggctcacgcctgtaatcccagcacttcaggaggccgaggcgggcggatcacctgaggtcaggagttggagaacagcctggccaacatggcaaaaccccgtctcttactaaaaaaaaaaaaaaaaaaaaaaaaaagaaaagaaaaaaaaattagctgtgcatgtgcctgtaatcccagctacttgggaggctgaggcaggagaatggcttgaacccgggaagcagaggttgaagtgagctgacattgcgccactgcactccagtctgggcgacagagaaaggctctatctcaaggaaaaaaaaaaaaaaaaaagaacaatttggaatctgttgctgtcttctggatcagtctctatattgatggcatatctcctttaacgtgtgaagaaataagaatttctgggccgggcgcggtggctcatgcctataatcccagcactttgggaagtcgagatgggcagatcacctgaggttgggagttcaagaccagcctgaccaacatggagaaaccccgtctctactgaaaatacaaagttagctgggggtggtggcgcatgcctgtaatcccagttacttgggaggctgaggcacgagaatcatttgaaccagggaggcagaggttgcagtgagccgagatcacgccactgcactccagcctgggcaacacagcgagactccgtggagtaagataaataccaatatgcaagaggaaggatgaggaaggggtgctctggtgagggcctgggctgacttgctcaggtatgtcacctcggctctaccaagaattttcagtgtggccttgggtggccgttgctctcctggagtcagtttcttcagctataaatgaggagggggaagactccagtgtatgtgtagcacaaaattttgactcagggttctctcctaaggcctgctgcctaattttaaaaacaatgggaaacggtgtccccaggtaattgtcctacacatcagtttagagcacagaagtgaggagcaaggccaggacaggggaggagaagcctgcacctgaggcccaggtacagctgagcacatgtagagggaggtcagggagccatgggcttagggcaggcagagggaccatctggtaatgaaagggctggtctgggggaatgcagagaaggcagaaggtgctgcagacagttctgccaggtcctgggcttgaagcctactctcccctgctctcccccgactctcccctgctgtcccctgctctcctgccatcccaccaccggtgcttcaactgatggggtagctcctgtcactagagtgcgtacctgagttttgtggagctttcagactctctgcaattggtctcctgagctgaagtccccacttctccccttcacccttccctagggtctggaaacttggatcacaaaaaggtggaaaaaaccaattcctttgaaaaggcccttgttctttcactcaagacactgggtgtggttcttaatagactcaacccaaacatgtcacatcatctctcaatacataattctattcatgctccttgcggaagccacctgggcagaaagatgtggcctcttgagggtgagaaaggtaaataagggagtcttaatttgtcactagctgaggttggaagctctaattttgtagttttccagggtgaacactgttttgtggtctaggattgtctgggacgttatttgctaacccaagccaccagcgctcaccacggcctaccgacattcctgttctataaaagttccacttggcagggcacggtggctcatgcctgtaatcccagcactttgggaggccgaggcaagcagatcacctgaggtcgggagttcgagaccagcctgaccaacatggagaaaccccatctttactaaaaatacaaaattagccgggcatggtggcacatgcctgtaatcccagctactcgggaggcctaggcaggagaatcgcttgaacctggaaggtggagtttgtggtgagctgagattgcacccgggcactccaatcggcaacaagagcaacactccatctcaaaaaaaaaagttccacctgcccaggtctgcattgggctggcattctcccaaggacttaatccaccatcgggctggcctacactaatgaatatactctcacctgggcccagcatgaggcaaagaaaaaccccagctgtgagatcagtgcatcagtcaaagcaactcagtggcttcctaaactgatttccacaaagtcacaaccggaaagcaagaaaagtaatttccacaactgtccttatttttcagttccacatttctgactccaggggagcatccctcattactctggtccatctatcattcctcagcttctgacccctttcagaacgtgacctggtcacttcacacatgtgggaggctgggcgtctgtactcatcttacagggaccccctgacccccaccccaaacatcaacatctgtccatttactcaaggtgtcacttctcagcaaaagtcttctttggattaatctgtgcccaccacccaggccggccacattctgtggttaccatcctgccatcaatggacagcatcacaaaatgtgatttaccaccatttgtgcttgttaacacttactgggtgtcagcgggcagaatggattaccagcccagggcgttctggccccaaatgcagttttcttctccagtcaagtctagactaacaaataccccacgataggcactcagtgctgaagtcagttcctggaaacaggtgatttgggcatgggaggttcagtgcctgtggcccgtccttctttgtttagccctcagatagtgtctcagtcagttcaagatgttacaacaaaatgcctaagaatgagtaatttataaaaaacagaaattcaaggccaagtgcggtggctcacgcctgtaatccttggcactttggggaagccgaggaagacagatcatgaggtcaggagattgagaccatcctggccaacatggtgaaacctcgtctttactaaaatacaaaaaaaaaaaaaaaattagccagatgtggtggcgcgtgcctgtagtcccagctactcaagaggctgaggctggggaatctcttgaacccgggaggcagaggttgcagtgagccgagatcgcaccacagcactccagcctgggtgacagagcgagactccgtctcaaaaacaaacaaacaaacaaaaaaaccccagaaatttctttctttctttttcttttcttttctttctttctttttttttttttttttgagacagagtcttgctctgtcgccaggctggagtgctgtggcgctatctcggctcactgcaacctctgcctcctgggttcaagcgattcccctgcctccgcctcccgagtagctgggactacaggcgtgtgccaccacgccaggctaatttttgtatttttagtagcaacggggtttcaccatgttgttaggctggtctcaaactcctgaccttgtgatctgcccatcttggccttccaaagtgctgggattaccagtgtgagccaccatgcccagcagaaatttatttttcacagttttggaggctgggaagtccaagatcaaggtgtcagcagatgtggtggctggcaaggactgtctctgcttctaagatggctcctgttgctgcatcctttggagtgtatgaatgttgtgtcttcccagggggtaaggcatgggagggaagaggcatgagggagattccttcggcctcttttatttatttatttatttattttgagacagagtctcgctctgtctcccaggctgaagtgcagtggcgcgatctcggctcactgcaagctccgcctcctgggttcacgccattctcctgcctcaacctccccagtagcagggactacaggtacccgccaccatgcctggctaattttttaaaaatatttttagtagagacagggtttcaccatgttagccaggatggtctccatcccctgacctcgtgatccacccgccttggcctcccaaagtgctgggactacaggcgtgagccaccatacccggcccagcctcttttaaaaaggcactaattggccgggcatggtggctcacgcctgtaatcccagcattttgggaggctgaggtgggcggatcatgaggtcaggagatcgagatcatcctggctaacatggcgaaagcccgtctctacttaaaaaaaatataaaaaatcagccaggcgtggtggcaggagcctgtagtcccagctacttgggaggctgaggcaggagaatggcacgaacccgggaggcagagcagtgagcaagatcatgccactgcactccagcctgggcgacagagcgagactctgtctcaaaaataaaaataaaaataaaaaagcgctaatcctggctgggtgtggcgactcacgcctataatcccagcactttaggagtccgagctgggcagatcacctgaggtcaggtgtttgagaccagcctggccaatatgacaaaactctgtctttactaaaaatacaaaaattagcctggcatggtggcgggcacctgtagtcttagctactcaggaggctgaggcaggagaatcacttgaacctgggaggctgaggttgcagtgaactgagatcacaccactagactccagtctgggcaacagagcgaaattccatctcaaaataaataaataaacagccgggcacggtggctcatgccagcaatttgggaggctgaggcaggcagatcacctgaggttgggagttcaagaccagcctgaccaacatggagaaatcccgtctctactaaaaatacaaaattagccagggtggtggcgtatgcctgtaatcccagctacttgggaggctgaggcagaagaatcgcttgaactgggaggcggaggttgcggtgagcccagatcgcgccattgcactccagcctgggtaacaagagagaagctatgtctcaaaaaaaaaaaatagtaaataaaataaataaataaagaataaataaagagcactaatccatttgtgagggtggtggaaccctcttgactttcatgtccacaaagtccccgcctcttagtaccatcaccttggggtttaagttacaacatgaattttggagggacacatacattcaaaccacagtgatgctggtacaggtcctgtatcagtcagggctctcccagagaaacagaaccagtaggggtgtgtgtgtgtgtgtgtgtgtgtgtgtgtaaagagaaagatttggccgggctcggtggctcaagcctgtaatcccagcctttgggaggcagaggtaggcggatcacgaggtcaggagattgacacagtcctggctaacagggtgaaaccctgtctctactaaaaatacaaaaaattagccgggtgttgtggcgcgcacctataatcccagctactcgggagaagaatctcttgaacccaggaggcggaggttgcagtgagccaagattacgccactgcactccaggctgggtgacagagcgagactctgcctcaaaaaaaaaaaaaaaaatggagagagagagaccacaaggaactgatttacacagttgtgggggctggataggcaaattcaaaatccctaagacagcctggagctctcaggtaggagctgatgctgcagtgcccaaggagaatttcttcttcctcaagggaaccttaggagttgagagttgatttttttttttgagacggggtctttctctgtcacccaggctggagtgcagtggcgtgatctcggctcattgcaacctctgcctcctgggttcaagcgattctcctgcctcagcctccccagtagctgggattacaggcatgtgccgccaggccactgattgtgtatttttagtagagacagggtttcaccatgttggtcaggctggtctcaaattcccagtctcagttgatccgcttgcctcgacctcccaaaatgctgggattacaggcgtgagaaaccgcgcctggcctaatttttgtatttttagtagagacaggttttcaccatgttggccaggctggtctcaaactcctgacctcaggtgatgcaccctcctcggcctcccaaagtggtggaattacaggcatgagccaccgtgcccgtccgggagttgatctttttttttttgtttctgagacggagtctccctctgttgcccaggctggagtgctgtggcgctatctcggctcactgcaacctctgcctcctgggttcaagcgattctcctgcctccgtctcctgagtagctggaattataggcatgagccgccattctcctgcctcagcctcccgagtagctgggactacaggcgcccaccaccacgccagactatttttttgtatttttagtagagacgaggtttcaccgtgttagccaggctggtctcgatctcctgacctcgtgatttgcctgcctcggcctcccaaagtgctgggattacaggcgtgagccaccacgcccggccttttttttttttttttttttttttttggagatggggtctcgctctgtcacccaggctggagtgcagtggtctgatcttggctcactgcaacctccacctccctggttcaagcaattctcctgcttcagtctcctgagtagctgggattacaggcacacgccaccacacctagctaatttttgtatttttagtagagacggggtttcaccacattggtcaggctggcctggaactcctgacctcatgatccgaccgcctcgacctcccaaagtgctgggattacaggcgtgagccactgcgcccggcggtagttgatcttaaggcctttcaacttgatggataaggcccacagaaattatcaaagataatctgttttacttaaagtcaactgacatctacaaaataccattgcagtgcctcctagattagcatctgactgaacaaggatactacataacctaggcaagttgaaataaaaagctaaccatcacaggtcctgtggctggaaagacaaattcatacccagaattaatgtcaattccagtcaagatggattgttgcctcatccagagtggaagggatccaatgtaatcaacttgtcatcatgtgtctagttgatctctgaggaagaatggtgccgtatggggtgtggcattggtctgttactggcaggttggttggcagtattaaaatgagtcttggtgagtgggaccccatgctctggggcccagttatagctttcattctctaccaccatggatcttcattcatgcaccaactggggaagcactaagttgaccaatgacagagactggctcatgtcagctggcctagttattctgtctacttagttgtatagtacatcttccatggcggatgctctctgatgggtatcagtgcaaagatctttgtactttacgcccatgcccgctcccacaggtccatccatatgtcttttttttttttctctgtcacccaggctggagtgcaatggtgtgatcttgcctcactgcaacctccgcctcctgggttcaagcaattctcctgcctcatcctcccaagtagctgggattacaggtatgtgccaccacacctgtctaagttttttgtatttttagtagagacggggtttcatcatgttggctaggctggtctcgaactcctgccctcgtgatctgcccgcctccgtctcctaaagtgctgggattacagacgtgagccaccgtgcctagccacatgtccctttactatgtctctttgtctctgatcttcccatctttctctctcaaacccctagcaaaccagtcaagccatttgccattgcacatgactccggtatattcttaccttgggctccttctctttccatatatagtggatgtccaggtgtgctgccaaagctctgcccactgagaggattttccctcactgccgtcttcaggacaatccagagtaggactgtagtgcagcgggagcccattcccagcttgcatccactgagccaatccatctgtgagccaagctctgcttttattccttttccttagttaatcataaaggattcccacttccccatgtggccaccgtacatgcaagctaaaggagaggtagcagtgcaacagtggtggacaacatgggggtctgcgtgcagctgtggtggatgacaatagtgcggggctgggccacatgctcatgcagcttactcgcacctcctacttgtgttctctgttcttgctcaagttcaatcctggatactctttgcatccatgagtgctcttgggtctacctaactggatgaatgggtgggtctgacaggatcgagttatgatgggcagttctggctacatgaacactggtgcacatgcccggctaatttttttttttttgtatttttagtagagatggggtttcaccatgttggtcaggctagtctcgaactcctgacctcaggcggtccacccgccttggcctcccaaactgttaggattacaggcgtgagccactgcgctgggcctggagtacatgtttcttagcaaaaactccaacatactccaactgcaactgccacttctttcccatccagtctgattaacatcagtgttgtggatcaaaatgctgttcttcaggatgtccagtaaggtccacttggactacattatatgagagggtgagagagatcacataggcagggtgtgtgtgtggtggggtgggggatggaataagaccataaacgcaaatttttttaaaaaattttttgagatggagtctcgctctgtcaccaggctggagtgcagtggcaccatctcagctcactgcaacctctgcctcctgggttcaagcgattctcctgcctcagcctcctgagtagctgggaatacaggcacacaccaccactcctggcttttttttatttttagtagaacagagtttcaccatgttagccaaggatggtctcaatctcttgacctcgggatccgcctgcctcggcctcccaaagtgctaggattagaggcatgagccaccacgcccagccctataaacgtaacttttagccatctaaagtgaatggaaatttttctgatcctcctcttgatagagatgaaaaataaagcattattagagcaatgggcataaaccatgtagttgaggctgtgttgatcagcgttagcggctatccacctctggcacagcagtttcaagtgaggcttacctcttgctgagtttgcagtagtccattttagtcctttaggatctgtctggtgaatttaagaaagatatcatgggaggccaggtgcagtggctcacgcttgtaatcccaccactttgggaggccgaggcgggcggattacctgaggtcaggagctcgagaccaacctggccaacatggtgagacccccatctctactaaaaatacaaaaattagctgtccgtggtggcgtgcgcctgtaatcccagctactcaggaggctgaggcacaagaatcgcttgaatccgggaggcagaggctgctgtgggccaagatcatgccactgcactcccagcctgggtgacagaccaagactccatctcaaaggaaaaaaaaaaaagggctaggcgtggtagctcatgtctataatcccagcactttgggagactgaggtctgaggtgggtgggtcacttgaggtcaggagttcgtgaccagcctggccaacatggtgaaactccatctctactaaaaatacaaaaaattagccaggcatggtggtgggcgcctgtaatcctagctactcagaaggctgagggaggagaatcacttgaaatggggaggtggaggttgcagtgagccaagattgtgccactgcactccagcctgggcgacagagcgaaactctgtctcaaaaaaaaaaaaaaaaaaaaaagatataatggagaccagcactcctgctgcaccctaatcacctccatagctctctgcagacgagccaccccaccccacagtcccctgacatggccatttgttatgataattcaacccacctggcttctgatgtttcagtgctgccacctggcctctgttaggtaaggacatgaccattctcactgtttttaggagtctagttctgtaacttctcagtgatgatggtgtccctttcaccagaaatttctcacccatttgatagaagggatgtccgccagaccctcccatggagcatagttagctggtagattttccagctttttttccagtatatacactctggcgtgcccaattctctttttatttttatttttgaggcaggtgacagactccctctgtcacctaggctggagtgcagtggtgcaatctcggctcactgcaacctccgccttctgggctcaagtgagcctgccacctcaggcctccaagtagctgggcccacaggtgcgtgctaccactcctgctaatattttttgtagttttagtagagatggagtttcaccatgttgccaaggatgcccaatactctgttttccacagcagtttcagtttttctacttcactcagtgtgggccattgctttctcccggcttccaagagccacccgggaagtatattagtaccatctcctgggatctttgctagagtctattatcaggacgctcccaagatgctccaatcaataaaattttttttttttttgagatggagtttcgctctttgttgcccaggctggagcgtaatggcacactctcggctcactgcaacctccgcctcccgggttcaagtgattctcctgcctcagtctcccgagtagctgggattataggcatgcgccaccatgcccggctatttttgtatttttagtggagtcggggtttctccatgttggtcaggctggtcttgacctcccgacctcaggtgatccgcacacctcggcctccccaaagcgctgggattacaggcgtgagccaccgcgtccggcctccaatcaataaactttcacttctccaaccttacgcaatgcccttctcacccccgtcaagtcctgtaatactgccccagcttctgtgagtacatgttggctaggtcctgcaacttcttcaggatacagagcctgaatgagtcacagtccaatcagaagacaaaaaaacacctagtaatttgaacagggagaaagttggatacatagactaagtataccagggaattggagtaatgaaggattagctagtaaaaaggaaactttcaagagcacaggaatagcagacataaggaacagtcactacccctaatgttgagatagagcacccaaggaaggggccatcccagggctgagatcccaatcttgttggcaggaaagggtcatggctccttggaggtcaaaaacatcactgtggggctaaagcccatctgcctgccgaactcactggcaatctgacctctagggtgcctggggaagtcgtgcacacacaggtgtgttatcagaagtgctccctaagcaactcctcaggggaatgctgggggtggctgctagctgctgggggctgctatttgcatgcagtagagctgggcagtggagaagctgctcacactgcaggagctgggagctagaggagccataggaggctgccgagaacagcacaattgcactagggaggaaaacactttcctcctgcaaagtttctccagcagcctctaatgacaaagtttgacatagtgccaactggcagaggagaaatatttgaggggctccgatccattttcatagagaaggcaatgaaggatttatttggagtgaagtggcaaaaaaatgacaactggcatagtccttttcctttagcgaggccagcacttacatagctagggtatgttgtgacttgactgtagtaattggcctagtggcaaggaaaagagatgggggatacatccagagaagtgtgcattactacaaggcacaagcctctgaattcaagcaagaggggaacattagcctcttacagagaggagtggaccatgtctgcagtcccagagaattcagggagatctgggatttcatggacccagatgtctccatcccaaatctcaggatcccatcccatcccaaccaggaccttcaactcattatagtaggcttgcagtggatgagaaaataacttttctttttcttttttctttttttttttttttttttgagacggagtctcgctttgtcaccaggctggagtgcagtggcgtgatcttggcttactgcaacctccacctcccaggttcaagcgattctcctgcctcagcctcccaagtagctgggactacaggagtgcaccaccacgcccagctaatttttgtatttttttgtagagatggggtttcaccacgttggccaggatgatctcgatctcttgacctcgtgatctgcccacctcggcctcccaaagtgctgggattacaggcatgagccaccgagcccggctgagaattcaactttttatggagttctgctctacttataattacgtcctgggcatgatcctcagctttctgccttttggctacaggagttgagtttctcctcattggctgccaagggagctgtgttagttttctattgctgtgtaacaaattaccacaaacagtggcttaaaacaacatctgtttgttatcatgcaattctgtgggtcaggagtctggacatgcttgactggcttatgtttgtttgtttgtttttctgagacggagtctcactctgttgcccaggctggagtgcagtggtacgatctcagctcactgcaagctccgcctcctgggttcaagtgattattgtgcctcagcctcctgagtagctggaactacaggtgcacaccaccacacccggctaatttttgtatttttagtagagacaaggttttaccatgttggccaggctggtcttgaaatgacctcaagtgatccacccgcctcaacctcccaaagtgctgagagacaggtatgagccaccgcacccggcccatgcttgactggcttctgctcagagttcaggtcaactgtgccatataacatggcataatcacaggagtaatatctcatcacattaacagattccagggttcagggtatggaatctttgtcgggggggtgctatttttatttcttttcttttttcttttttttttttttgagatggaggttttactttgtcacccaggctgatgtgcagcggtgtgatcacagctcactgcagtcatcatctccctggctcaagtgaacctcccacgtcagcctcctaagtaactgggaccacagacaagggccaccatggctggctagtttttttttgttttgttttcatagagacaaggtctcactctgttgcccaaggctggtctcaaactcctgggctcaagcgatcctcctgccctggcctcccaaaggcttggattacaaggatgagccatactgcccggcccaaggcggggttgtttttagaactttgcctactacagtctgccttctggctcccaaagattcacatcctccttgcccccattgcaaaatacatttacctcctctgaagcatcccaaaggtctcatcctactacaacataaattcaaagtctcaaatgttatctaaatatcgtcagctcaaaagcccaaaattatatcatctacatcaagtacagatgaattcactgcatatgatccactaagtatagctcctggacaaagttcctcaccatctatggacctaggaaattaaacaaattgaagctgggtacaatgagaggccgatgtgagaggaccacttgaggccaggaggttcaagaccagcagcctgggcaaccagcaagaccctgcctctaaaaaaaaaaaaaaagaagaagaagaagaaggagaaaaagaaagaaggaaggaaaggaaaaaaaaaaaaaactgaagttgtggctgggcacggtggctcatacctgtaatcccagcactttgggaggccaaggtgggaggatcacttgaggccaggagttcgagaccagcctgggcaacatagtaagacctcgtctctttattaaaaaaataaggcaggaggatctcttgagcccaggaggtcgaggctgcggtgagctgtgatcacgtcaccgcactccagcttgggtgacagagtgagaccctgtctcaaaaacaaacacaaaaaacccaagttgtatgctcccgacactcccaacatacaatagtggacaggcaaaggataatagttatattctggtccaacaagggggaaaggtcactggtccaaagcaatttttaaatccagttgagcaaactccattaggtttcaaggcctggaaataatccttcatggcccttgactctatcctctgtgctcttgggtgcaactcctgagtcatctttactttttcatgaaacatagcacatgtttgccactaagtttttttttgttttttgttttttttctgagacagagtttcactcttgtcactcaggctagagtgcagtggcgcaatctcggctcaccgcaacctctgcctcccggttcaggcaattctcctaactcagcctcccaagtagctgggactataggcatctgccaccataccttactaattttttgtattttgggtagagacgacgtttcactatgttggccaggctgctggtctcgaactcctgacctcgtgatccatctatctcggcctcccaacgttctgggattacaggcgtgaactactgtgcctggcctgcagctaagttttatcaacctgctttctgccactaaaattttggggactcaaagactttcttttttttttttttttttttttttttgagacagagtttcactcttgttgcccaggctggagtgcaatggctcaccacaacctccgcctcctgggttcaagcgattctcctgcctcagcctcccaagtagctgggattacaggcatatgccaccatgcccggctaattttttttttttttttttttttgacagaatcttgctctgtcacccaggctggaatgcagtggcacgatctcggctcactgtagcctctgcctcctgggttcaagtgattctcctgcctcagcctcctgagtagctgggactacagacgtgtgccaccacgtccagctaatttttgtatttttagtagagatggggcttcaccatgttggccaggctggtctcaaactcctgacctagtgattcgcccactttggcctcccaaagtgctgggattacaggcgtgagccaccgcgttcagcctaattttgtatttttaatagagacagggtttctctgtgttggccaggctggtctcgaactcccaacctcaggtgatccacctacctcggcctcccaaagtgctgggattacaggcgtgagccactgcgcctggcctagactttcttttattttgtactctgtccctctcagtccaagctcacagtgtttctgctggtataaacttctctagaaccttgtgggctttgcatagattttgtagggattcactccatcagacaaatgctcttccacggatctttctaaaatagtcccttcttgatattcggcttctgctgagaagcctaagggataatacctcgtaagcttcctagagacaccctggtttaagtgagatctatgaagacagccttagtacaggttgaattgtgtcctgcccaccccctcctccaattgctaagtttaagtcctaaccacccacatcccaccttggaatgtaaccttatttggaaatggggtagttgcagaggtaattagttaagatggggtcaacctggagtcaggtgggcccctaatgcaatatgactggtgttcttataaaaaggggagatttggacacagacatgcacacagggagaatgccacatgaaagtgaagatcaaggatgatgcttctacaagcctaggaacactaaagattgccagcaaaccaaaccccagaatctagggaagaggcatgggacagattgtccaactccaacaagaaccaaccctgcagacaccttgatcttgtatttgtagcctttagaattgtgagacagttttttttttttttttttttttttttgagacagagtctcattctgtcacccaggctggagtgcagtggctcaatcttggctcactataacatctgcctcctgggttcaactgattctcgggcctcagcctcccaagtagctcggattataggtatccaccaccacacctggctaatttttttgtatttttagtagagacggggtttcaccatgttggtcaggctggccttgaactctgaactcaagtgatctgcccacctcggcctcccaaagtgctgggattacaagcatgagctaccgttcccagccagagacaatacatttttgttgtttaagccacccagtttgaggtactgaactacagcaggcttaggaaactaacacaacctttaatcgcttatgattgacattttgatctttctgagatgtcagcaaaagtttgtgtagtcccatacttggacttttatctatgttagttttgggcaggcacttctgaattttagcctcttttgcaacctggatgggctgagaattttccaaattatcaagtcctgattccttttttttttttttttttttgagacagagtcttgctttgttgtccaagctagagtgcagtggtgcaatcacagcttaccatagccttgacctcctgggctcaagcgatcctcccacctcagcctcccaagtagctgggactacaggtgcatggccaccacatctggctagttttatttttcattttttgtaggaacagggtctcaccatgttgtccaagctggtctcaaactcctcaactcaagcaatccttcctcctgagcctcctaaagtgctgggattacaggtgtgagccacggtgtccatccctggttcttttaacagttcttctttcatttattcctttatttatttatttattgagagacagagtttcactctgttgcccaggctggagtagaatggcgtgctcttggctcactgcaacctctgcctcctgggttcaagcagttctcttgcttcagcttcccaagtagctgggactacaggtgtgtgtcaccacacccagctaatttttgcattttttagtgaagacggggtttctccatgttggccaggctggtctcaaactcctgacctcaagtgatccgcccgcctctgcctcccaaagtgctgggattacaggtgtgagccaccatgcccagcctcttcaatttatttctatcctcttgcattttactatgagcagcaaaaagaaagtaggctttgcctagaaaaatgtcattggctaaatatgtacattcattgattacaagttctgtttttccatagaactgctagacacaattccactaagctttctgccactacatgataagaatctcccatccccagcctccaacaacatgctcctcatttcctcctgagctcccactgtcagcgtcaagtcaggtttctactaatggtctgttcgtggagactgaacctttatctaagatattgagaatttctatacattctttagaatttaggattctcctttcttctgaccagcaacgtctttagcatccatatttcttttttttttttttttgagatgctctgtcacccaggctggagtgcagtggcgtgatcgtggctcactgcaacctccgcctcctgggttcaagcaattctcctacctcagcctcccaagtagctgggattactggtgtgcaccatgcccagctaatttttgtatttttagtagagacagggtttcaccattttgcccaggctagtcttgaattcctgatctcaggtgatccacccgcctcagcctcccaaagtgctgggattacaggcatgagccgccgtgcccagccagtatccatatttctaagaaaggtctgcttaaggaaatctaggctttttctatcaagctcctcaaaattcttccagccttcactcactgtgcaattccaaagtcattcccacatttttagatatttgttatagcatcccacttctgggtagccacatctctcttagttttctagtgctgcataacagataccacaaatgtggtggctttaaacagcacaaggccttctgattttcacacatgacctcaattggtggctaaacgcctccagcctttcattagctttcttgaatgcatcagtggtgttcaccaaaagccttcagattcttcggaatctgaagccttcaccatctgtagaatcagtactccctccaacctctcaaaagcctatgataaccgggcatggtggctcatgcctgcaatctcagcactttgggagactgaaatgggaggatcatttgaggccaggagttcaagtccggcatgggcaacaaagtgagactgtctctaaaagaaaagtctatgatactgcacgcaccaccatgcattcccttccacaggttcaccactagtgaaagtttgagcaattccaccacttcggcacacttaggatatcagttccacctgccactagtgatggctggcaagtgatccaggtccaaaaccctattttattattttattttatttttgagatggagttcaagcgattctcctgcctcagcctcccaagtagctgggattactggtgtgtgccactacccctggctaatttttgtatttttagtagagacagggtttcaccatgttgtagtcttgaactcctggcctcaggtgatccacccgcctcggcctcccaaagtgctgggattacaggcgtgagccaccgcacctggcccccgaactcctttttagagttggctttcccacaccactcctggtgctaactgtattagatcaggttccccaggaacccacacgacgactgagaaccaaaacctgaggactgaaggaagcaggattggacaaaaggccatgtggggtgcagaggtgagctgtcatgcagtcacaagggcctcaggtgatcttgcggaagtttgggagagggtggctctttggaattgtcccacccaaggcacagataagggtctttatgcctcttcatcaaccagccattgtatgtgaactgcccgggggaggggaggtggctttcctcagcttagcgcaattccaggagagggacacagctgagagctattggcacaaacagccgggaggatgagtgcctcagtccctgaagggaggggacctgggtggcccccctgccccatccactgccattattattttctgcatctcccaatagttaatatttgtactttgtattaattgtctattgctgcatagcaaattaccccctgaacttagaggcttaaaacaacaaatatttgtaacctcgcagtttccgctggtcaagaatctgaggctgtgtgtctggctcaggggctctcaggagacagtcatcaagctactggcttagaagcacctcaaaactctgctgtggctggagggaaccatttccaggctcactcatgtgactgtcggcaggcctcagaagacccactgcaagcccactcactgggtgctggcaggcttgcgatccatggcacgacttccgtaggctgcctaagtaacctcgtgacatggcggctggtgaatggagagcaagagaccacaccaagtctgtttgtataataacttaatcttggaagtgacatctcatcatttctgccatattgtatttgtttgaagtcactcagttggcccggcggggtggctcacatctgtaatcccaacctcactttgggaggccgaggcgggtggatcacctgaggtcaggagttcaagaccagcctggccaacatggcgaaacccgatctctactaaaaaaaaaaaaaaaaaaaaaaaaaaaaaacattagccggggtggtggcgcgtgcctgtaatcccagctacccgggaggctgaggcaggagaattgcttgaacccaggaggcagaggttgcagtgagccaagattgcgccactgcactctagactgggtgacagagtgggattcggtctcaaacaaacaaacaaacaaaagtcggccgggtgcggtggctcaggaggctgaggcaggagaatcgcttgaatctgggaggcggaggttgcggtgagccgagatcgcaccattgcactccagcctgggcaacaagagcgaaactccgtctcaaaaaaaaaaaaaagttttggattttggagcattttaaattttggattagggatgctcaacctgtactcagttatggccaaaaaagtcaagcttcttgcacaaggaactggtacaaagatataaactttcagtaacttatacctaaatctgggggctgtttcaagttatctattgctgtgtaacaaaccaccccaaatcttagtgatttataataatactataataatagtttatatctcatgatcctatgggttggctgagaggttattctgctggtctcacctgaacttttttttttgaaatggagtctcgttctgttgcccaggctggagggcagtggtgcaatcttggctcctgggttcaagtgattctcctaccccagtctcctgagtagcgggattacaggtgcccaccaccaggcctggctaattttgtatttttagtagagatggggtttcgccatgttgcccaggctggtcttgaacccctaacttcaagtgatccacccacttcaacctaccaaagtgttgggattacaggtgtgagccaccgcacccggcctcgcctagactcttaagcatgcatttacctgtgggtcagctgagctggtgggtccaagatgtcctcacccacgtctggagctgggcagggacagctgggaactcttgtctcgatacagctctcatcgctctggtctagcctgagctttttacttggcaggcatgtttcaagaaaggaaaataaaggcagaggctgggcgcggtgtctcatgcctgtaatcccagcactttgagaggccaaggcaggtggatcacgaggtggagatcgagaacatcctggccaacatggtgaaaccccgtctctactaaaaatacaaaaattagctgggcatgatggcgtgcgcctatagtcccagctactcgggaggctgaggcaggagaatcgcttgaacccaggaggcagaggttgcagtgagctgagatcacaccactgccctccagcttgggcaacagagcaagactccatctcaaaaaaaaaaaaaaaaaaaaaagaaaaaagaaaaatagaaaatatcaaagtgcagcacatatatttttcttgaaccttttattcacttatataaataaactcatatatatatgtattgagtagcaaagtagtggtaaaaatatttcttgctatggggtcatggtgaaagtttgaaagcacttatttagtatatactcaggtgggagtgattacctaccctgtatctatgaagaaactgtgttaacatctacatctagttagagatacaagatgataaagaatagcaattctatgatttgggcagttttattccattctaagaggtttcaaagggaaacttggacaataagatttccttcctatacacccaactccctcactggaatccttagaaggaacaaaatcaggtggcttatgggctgggaaggcttattatgacagaagctagttgatcttccagctgactacagtcacagctctgagggcaagcttcacagtataagggcccacaccacctgacattatataagatcatcatttgtttattgtcagggtttctccactagaaagcagggtctgtgagagtagagcctgtctttctcattgctgaatccccagtggccagatcaatgtccagcacgtattaggcatctaataaacatttgtggaataaatgaatgactgaatgaagggggtagaggtagggaaagatgcctcatcccaagtaccatattttataattattgcttttcactgactgtactttgtaagctgtttccatctgtgttgatttttcttcaaattggttcagaacccaatcctgatcctttttccaaacactgttctcaaggatactttcagattattgctcggctgaacaaactagtgttactgaaaccaaacagcgctgcaaagagagaactaatcactctgcctttggttaacagccttgaaaacatgttattcatgaagagatcaggcagggtttgaggtaggtcagcctattaccatcactagaaacaacaaataacagcagaagaggactgcaggattgttcatttttctcaaaaagggcaatttgttagccagggggacctcaaaatgttgtcacctgagggtaaggaagaaatgaagaaagacacacaggggatatggctgctttttttttttttttttactttgaacattagcattaagttggttaccgtacacatccaaaggcccagcatctcagaaaaatcattaggcggcacacctgtaccagagtctcacaagaataaaatatacaatgctacattgagtggttaaaaatacacaaaaaagtagttttaacaatctataaattttttatacttaaaatcatgattgagttgaaataaaaaagtgcatttcaattgctaaaaaaataatatcggtatagttaacacaagggggaaatcagtacattgagggatctgacaggatgctggaaaaaatgactcagggaagccgggcagcatgggctcctttggagattcaggagcggagctcagttccacctcactgcagttccctggggccaagcagccctcctctccccagtatctttcccatcttaagagatcctgtcctacctacctgtcacctccccaacccaaagactcctctaaacttctttgcagcatgacagctgcctgccctacactgagtctacttgaccttcaattgcgtctccgcagagaggtaggagagggacactgccccattctggacttgacataagtaccccagccacatggccttcatccttatgacctagcaggcagaacagggaccaagcagcttctattttgtcaaactcctttggacaaatattcaacattcaacaacaagctttgtaaacctaacgctaaacaagtcatggcaagcaaactggattttcttaagaaatgaggaaaagtgcaagtgatctcagtactgttggggaaaacaaaaataaaaacaaacaagttgcacctggccacttgctgcctaaaccaatcacagcttcagttttgttttttgtcaagtgttggagttacaagtagacacctctctgtgcctggtattgctcaggttcagacttggctgggggtgaggtggccaggcagaaatcagttaagaaggccattccaggtgtaaatgcctcccggctctacagggggtaatatttactgtcgtcttttcccttcccaggttgattactgacctgtttgttgtgaagatgctgctgcaataagcacaaacagaactcatggccagagagctgatgaccacggataggagcccttagacaagtaactgacagagagggagcacacacagtttctaacctggagtgcccgttgcactggtcaggaggaagtgcctgacctagaggacttgttccctgatgtaacagatatctctttggagcagagaaggtgagaagcatttccttactcatactccagagttcccccagtgctcttgttcctcctatagatgtgatggtggtggcctgcggaggagataggagtggagaagcctgcctgctctgcctttagcacacaaaggcgcccctatgggaaggtcctggctttcaatctggggatcatcaatatgtaaaaagtctaattaattaagatgcctgacccacaaggactccacacccacacatcaatcattgcttggcatcatgagggatgaacgacgactggactttgtaataagggaaaatttcttaaataatcaaaatacatgaataagctttgagctaagaggctattccagaagagatttaaaagtgggatctttctttagaaggttgagaataaagctaacgtactttattgctcccttgtggacaaagccagaactgctgatggaaaacagtcacacagcccatgtcaagaaatgaataaaatgcatattcaaatttatggaagattgagaagaaatcatcccattttcagaggctacatatatgcccttggggagacaacttaagaagtaaacaccaaaattatgtcacactgtttctttttaaactaatgaattgaattaatagagcatgaaaagatatttctaggagggttaggagctctagcagaataaaatacttcccaccaactttcaaatgcaatgaaacagtcttgagtcctgtacaggatgtctatcatgctcatcagacggtcccttttcacccataaaagacaggtagggaggaagctgtgttcattcagaggagctggatattccagaaacaacttgactctttggcacatccagtacagacacaggctctttagttgatcagaactagccaaggcaagtatcagatttccttctgaagttaagcaaaattcagcttctacctcctttcttgccccatcctcacttcctatgaaatcattttcaagtaatatgtaacatccctgatctcaccagagaagctgacgtagtgtgaaagtaacctgcgactggaaagctatgggaacacttctcaggggcaggaactcccttgaatgtgtgtgtcagaagtttcctactgaagacatacaagacagcaggctgtctcaaggatgtggttcctccaagtgacaagcaagtacagctctccgttgttttatggcctgggaccctgaagagaaaagccacaaattttaaagtagatactaagttactagttactatccaagaggcaaacttctagatcaataatgaggaagaaacatcatggcaaatcaagtgaaaggtaattaacacaacaagaaacccgttactgatttctgtaacataaaaatctacctttttcattttgtaaactcaccttcccatcccaaatagcagtgaagccttcaaaaatcttgaatttattcatcatcaaacataaccaattctcacaattttgcactatctcaccaataatatctttcctgttgccagacaggaaagatggagaatgtattaacagctgccttcttagatacccaccttgtgtggttattagtcttaaaaacctgagtactattaactttaaggaaaaggacatgagattttaagtcagaaaggaaaaatgctgactaaggcccaaatgctcaactccaagctttcattcacctaaaaaaatgcaatcaaatctcctcatttgaaagagttctttttttttttcctttttctccagttttggaggagaactggaagggagtaaaaagacctgtccacagcacaaacttccactctggctgtgaaggactagccaattgctaaatgtttcatcacggaggtgctcgatcatattatataaaacactgcaacctccttttcattacatccttcatatattatggatccatcatacattttaaacaaattagatgaaaacagctagaaaaagtaaacagaagtttttgagggacagggccatgagagagcagaaacccagggagcaattttaaattaatttgactaaaataaagagtatagtcttgcaaaatgtgtacggaagggagtgggcacatgggaacagggcagagcaacagcagcactcaggatcctttcatcagaaaggggaggcattcaggaagacttcagttgagaaaaaggtgttcaaaagacattcaatgacctttaattttaaaggaacgtcaaatttctggtgaaagtaaaaaaagtgaagagtcaaataaggataaaatctttcaacagagagacgaaatatgtgaagaaataagatataaataaaagttaaaaatataacctaaaaatgacatggaggaacaaaacagaaatacggtcaaaattcttgtccaaggttttagctagtttgtagagttaagcccattggaatatgggtgaattccaatattcatggataatgaaatagtcagaggtaggatttagatcaggaaaagaatgttccaggatgctggcattttgaaggcactcaaaaacagagtgagagagactgaagctgcagtgacatcagaggattagagagaggtgcatactcatgtgtctgtcataaagaaataaaacaactccaggaacctgtgaccatacatatattattgagtaatacatagagtaacaaagcagaaagaaagccaccttgtaagtagtttcttactacaatacagattctatctagtgaacaagaaacagtttgttttccaaatatgtatgtctgcaaagtattctgacttaagtaaagaatttgataaatggtatgtgatctggttctttaaacaaatttactgaagcaaaagcttcaaagctggaacaaccaaggagtttgattttcctttgaatcttgcaaaacctatcctctgagacaaaaagatctgatcataaagtctataaaaaagtctagaaagtataaaagtatagaactatgaaagtggatatattgatggcaacttttatggcttccatagaaagtgtagagaggatctctggtttgctttatcgaggtagtgtccagggttggaaggtcatcattctttattgtaagtgctacagatgacaaaagcaggttagctagggtgttgttattgcataataatgccactatttctaatggcttatgacctttcattcctaaaaaaaaaaaaaaaaaaaaaaaaaaaaaactcttaagtaatttcctatcttggttcaggcaaaggaaaattaaaacccaaactttacttgctcaattttatagtccgaagaattccaaatgagttgatttttttaaaacagtaattagctgatacaattcttaaatgtaatgtatcccttttttcattaagtacttctcatacagtctagaacagcattgaaatatttatcatgtggaccagcaatgcaataaaagttgtcttttctatacagtagctcaaacagaaaggtttctctaactttagttttttagtttttttttaaaacattaaaaccgacctatcattctgtgttttactaactgaaacctgcaagatggggtaaatatacatatatctgcaatggatttctatctctgcttcatcttctcaaaatttaaaacttccagtgaaataataatggaactaaacatacatatctattcaacaatcataaaaactgaaaaaaatttcaagaattaaaaaattcatagtttataagcatctcatcagagcattttgctttcggttagtatatgagggacaatcaaattatagggacagttctaaccactagaaaaggatacttcgaacaaatgtggttttaaaaaaatgatgtaattatggtaatggccatgcttagtcattaatctagaacagttaatgtaaatggtagactatgaaagtacaggtaactgatttgcacagtcttctttgaactaaagttttttttgtggcgatctcccctcttgctaaaaataagaatccagtcacaaatatatgtggaaatgaagccacatgcctttaaattgttgtcttttcttcattcaaatttaaaaatctaactccgaatgagcctatctgactcaatttgagaaagcagcagcctttattaaggctaaggaagagtttatattttactgataaatctatgagagaaaatagaaaaataaaaacgaaacaaatacaaaccaacccacacacacaaaaaatacaatgccaactcatcctcaaataagtcttaaccctagcaatgatacaagcctttgaagacagtaaaactaagtaacgagagacagcctcaatttgttatctatataatgcttaaatgcagcctttgttgtctttaacagacatgtacagataagggctgagaactcaaacttctccataattctttttttcataaacagataacaagtaggtaaaaagttttgaagaattcatggggtgctgtagcatatatggaagagaacataccacataatgcaacttttatcttacaaagaggaccccaaccaaattttcaaccctgagtttgagtcttaagcatgttaaacgtgttgcacatatatgtttaaggcttaatcctgcagttcttctattcagaagcattaatgttgtgaatattctttttttttttttttttgagatggagtctcgctctgttgcccaggctggagcgcagtggcgcaatctcggctcactgcaagctccgcctcctgggttcaatgttgtgaatattcttaatgcatttcattatttatatacaatatgatactgatgaggagtcattatattctgagtagttttcctgaagaccacaagtctcaagtcaaggaaagtatccttaatctaggggaaaaaaaggaagtttctaaattgttccacaatacacttcactaagaattgtactgtatgacaatgctaatttttaaaaataatatatatatatatttttgtttctgttaaggatggtggtatttgcttaatactggttttcctgtatagcagatattttcttatggctatatttacttgaatgaaaaatcaaagatgactacctgaatattccagtgtataattacagtacaacctcatgaaatggttgattctgtggtctcaagtctagaatccagaattgctgcccaatactgtaaatttattcagaacaaaataaggcagttggacgtggtggctcacgcctgtaatcccagcactttcggaggctgaggtgggcggatcacaaggtcaggagtttgagaccagcctggccaatatggtgaaaccccatctctgccaaaaatacaaaacttagccgggcgtgctggcgcatgcctgtaattccagctactcgggaggctgaggcaggagaatcacttgaacccggggggcgggggttgcagtgagccaagatcacgccactgcactccagcccaggcaacagaacaagactctgcctcaaaaaaaaaaaaaaaaaaaaaaaaaaaacagaacaaaatataaccaattaactaagcacagtttacatcttttaaaaaaatcattttaatactacaggcttgaccatgaaataatgatatgtctatataaaagtgtaggttgacaaacttgtcatggaatgccaaggagactgtggagggagagggagacaaccactaaagatataacagtcatatgcaaggaattaactttccttattggcttgggtacctgggtgctcaaagaatgtgtacaaatattaaaaataccattctttaaaacttacatccaaaaccaggaagtatgtcttgatatacttttctgcctcattccaaaattttcctatgctcattatataagacaggcaaaatcagaaggagaaaatttagaaacactaaaccaaaaagccaatagagaacgtgatgtttgaaaaatatggacttaatctcaattgaaagagttcattttttcttaccacagagctcattagttagaaaagtgctcgaagcatatctgcacatttaatattaaaaataaaaaaataaataaaagccagcgttctgattcaggcaaagattttaagaaaccgaagaaagaaaaatgaagaaatttcaagattaaaaaatggactgggcatggtagcatgcacctgtagtcccagctacttggttagctgaggcagggttgcttgaacccaagagttggaggctgtagtgtgctataactgcacctgtgaatagccactgcactctagcctgggcaacatagcaagaccttgtctcttaaaaaaaaaattggagagggggtgggaggtaagtgatttagcctgggaactcagttctctcagataaagaaatacaaaattttaagctatactgagtctggataaatatgatctgttaagtgtaatcaatacactagcccttctgttcagcctttcctataataagctcctggttgattatggtcttttgaagttccccaaacttgaaaaagtaatctgcctaaaggtactagaggtgctgctctctttatcgcctaagaatgctggtattacataatttgcagaggacagggcagtaaaacttaggagttttccctcactatatttaaactgtgttaaaatagctcaaggttgtgaacatatccacattttacatataatagatatttcaaaattcataaccaatttgtcttctcatctgaatttctcagccactatcagcaatgtcatgtttgtgattttaagtttactattttagcttcttataacaattctagaaaaataaagcaacctcaaaatgagcgatttcaatttgtcatcccataaaagttaaacatcaacacaattcctaagggaagtgagaaacagacgtgactgagatgaaatgatctccactacttcctcctcctgtcagcaaacagccttattcaaattttcaaaacatgcaagctttaggtgacttccctggaaaaggccccatcccctgcaaatcatttcatgtaatgcactaacgaagccaagcagaacatggaggacaggagcacattagggagcctctcttgagtgttaagcagagatgtcaaaactaccaagtatttacgccaaatcctgaaagcaaaacctcatttttgcagtaacctggtctggagaccctctcagatacatctagtctctgaagcaccttttgagttgtacggatgtaagaatagctttgaattatagaagttatatgcatctttaagaatcacattttgatgattataaaaatttttttctattttacaacataggttcagctacactgaaaaaattacactgcttattgaaatacatttcattttagaaacagactaccaaagaagtctatacaaaaactctaaaataatttctgtagtaaaataaagagtgcgttaggagagctacacaaagaagaaaatttctgtctttctctataatgcttgatatactgtgaaacatggccagctcaactctgtagctggcaccaaaagctgaaaagaattccttaccatacacagtgatacaattaatgctctggattaatctcacagccttcccgattagtacaaaggaaaccaggcctatcccctctttgaggagaagtctgggatataaaagcaagcatacctcatcagctgatatgaaattataaaattccacaagtctgagtatttgaaacttataaaagtcatcagaaaatgcaagcaaattgggctttagttcagtggttcccctggtttagatgacagtccctctgtgagctcaaggtagtcttcttgttcattcccttggatctgttgattcagtgacactggcgaagctcttggtagaggcggaggagagtctgagaactaaggaaatgctcaccgactccctctgtgcacgctcacacatggggacgtgtctcctggagaacacactaaggagacggatgttaatgatgctgtgctgaactgttcttctctgccaggtgccgcagaaagttgtcctcactctggcctctatgatttaaaggctcactcttaaagagagctggaggtggcgggaggtgagggactggagggatgggaaggtggtgtgggtggtgagggtgtgggtggatgtgcaggtgtgagaaggggtgggggatgggccgagggggaagagtgcttacaggattcatattgattggaggggttggggttgtggctgtgttcaccacagaaggaactggggtggctggggaagttgtaagtgggatctggacagcaggtggcacattcacggggctggtcacccgaaagcacttctccttgtgggccttaagcatgttcgagaagcggaaccgctggccacacacatcacatggatagggcttctcgcctgtgtgagttctgcggtgtctcttcatgttggggcggctggtgaagcttttgccacagatttcacagataaagggtttctctcctgagatgaacacagacataaaaatgattaacatattaggtggtaattgtgtgctcaagctttttttttttaatagaaatggggtctcactatgttgatcaggctggtctcgaactcctggcctcaagtgatcctcccatcttggcctcccaaagtgctgcgattacaggtgtgagccactgcgcctggcctatgagactgtattctagagtcatttaaaaatcctctcaaatttggacttaacagatcacagtagatacaactaaaacttacatacaccctaccatctgggcttagataaaagaagaagataaagatgggggagaaggcatctacattagtgatcctctacatcctacacaaagaacagttcaaatggctttctgtgctcaaggaaatatcctagatgactctttgcctttaaatttaggcaagttaatctgtaagaaattttttttcttttttagttttttgagacagagttttgctcctgtcacgcaggctacagtgcgatggtgcaatcttggctcactgcaacctccacctcccgggttctaatgattctcttgcctcagcctcctgagcagctgagactacaggtgtgcaccaccacgcctggctaatttttgtatttttagtagaaacggggtttcgccattttggccaggctggtctcgaactcctgacctcaggtgatctacccacctcggcctctcaaagtgctgggattacaggtgtgagccactgcgcctggctgcaatttcttttttaaacaggatcttgctctgtcacccagggctggggtgcagtggtgtgatcacagctcgctgcagtttcaacctcctgggctcaagcaatcctcccagctcagcctcccaaatagctgggactactacaggtgccagctaccacgcctggctatctttttttttttttttttctgtagaggcagggcctcggaattttgcccaggctggtcttgaacccatgggctcaagtgatcctcccgcctcagactcccaaagtgctgagattacaggtatgagctaaggccctgccctgtaagcaatttctgatactccaaacaaaagtaagaattttctgaaaatgtcctgtggaacaaagaagtctcttcctgtctattcatacacaatccttagcatacagcttgctttttggcactgaacttagaaaatactggcttaacaaacctacaacatgaatttcacaccacagtgtttctcaatgagtgctatggcatttctgcagacaattcctcattatgtgggactatctggcacccagcattcctggtgccagcctactgaatacccacaagagatttcaacaataaaaaaatgccgctatgccatttcccaatgtccgtgggtgtagggagggtgttgggggctactgctcctagttgaggaccagtgggccagcgagtcaaaacaggagacagaatcccatagttcttagagcatttagaaaggaaattacgtttgggttctgagggcttaatttttaagcttccctaactttcttttgaacttattgcttagttccatgctgtgtctgcctgcttctctacccaggctatagaaaataaaatcctttatgattctatatgtccatcaatcattttgtatgggatgctgaggtgaggcggggagtacttctgtatatgcacttcggtgaaccatacgcttgtactgatcaattcctgcatcagtcctccatatctatagctcgtctcttcacattaactcctgctataagagcgttgctgtcacttcccttgctgctccctcttctctcaacgaatgtgtttattctactcatgtgtattgggtcttactgtgtaccagacactgctaactgctttacatctattaaccttggtgatcttcacagtgactgtatgaggcaggtatattattaccccttattttactcataatggaattaataaacttgctcaagtttatatgctaatggagagttaggatttaaaatctgcagcctggttctagagtttatgtttttgacatataaaccacagtatttcacaaatcactcaacatgcatttctgcacacatgaagggatgtattttcttactttctcatctactttgggactccttttttcccaccctccaggaccccttcttatacctaagagaaaacacctctttacccatagcatagtccaaatttcttgtctccagcttttcattatagtagaaaactgacatcccctatggcctcttccatggaagccagaattttcctcactttcctgagagactgaagagtcaattttctccataactatcagtattatttgaagactatcatatttcccttgtctttacgctttttttttgagtcggagtcttgctctgtcgcccaggctgaagtgtaatgagtggcacgatctcagctcactgcagcctctgcctcctggactcaagtgatcctcccgcctcagccttcagagtagctgggattacaggcatgtgccaccacacccagctaagttttgtatttttagtagagatggggtttcaccatgttggccatgctagtctcaaactcctgacctcaggtgatccgcccacctcggcctcccaaagtgctgggattacaggtgtgagccaccacacccggccctctttacacttttcattcttcaattactgccacagctaggctccttactgtgactcatattcatctttctggatgaattctgagcccagattgttttccttctttttaatcgatttcctctaaccgtcttaaaaacttcaacttctggcagggtgtgttgtttcaagcctgtaatcccagcactttgggaggccaaggcaggaggatcacttcaggccaggagttcgagaccagcctgggcaacacagtggcaccctgtctatatagtaaaaaacaaacaaaagcccttcaacttctgtgttaaatggaattaagcaaatcaattatagtatatttgtttgatggaaaataccactgaaaacaatgttacaggctaggtgaggtggctcacacctggaatcccagcactttgggaggccgaagcaggaggattgcttaaacctaggagtttgagaccagcctgggcaacatggtaagaccctgtctttacaaaaacatacaaacaattagccaggcatggtggtgtgcacctgcagtcccagctactgaacaagctgaggtgggagaatcacttcagcctgggaggcagaggttgcagtgagctgagattgcaccactgcgctcaagcctgaaccacagagagagatgctgtgtcagaacaacaacaacaacgttataaagtatagaaatgtaattttttttttttttgaggtggagactcaccctgtcacccaggctggagtgcagtggtgcaatctcggctcactgcaacctctgcctcctgggttcaagtgattctcccacctcagcctcccaagtagctgggactacaggcacgtaccaccacacccggctaattttttgtatttttagcagagacagggtttcaccatgttagccaggatggttttgatctcctgaccttgtaatctgcccgcctcggcctcccaaagtattgggattacaggcatgagccactgcgcctggcccagaaatgtaattattaacatcaaaatgtataatctattaagtttatctatgatctattaaataaaagcaagttatgaaaatgtatacatgaggacgggtgtggtggctcatgcctgtaatcccagcactttaggaggctgaggcacgcggatcatttgaggtcaggagttcgagacaggcttggccaacatggtgaaactccatctctactaaaaatacaaaaattagccgggtgtggtggcacgcacctgtagtcccagctgctggggaggctgaggcaggagaatcgcttgaacccaggaggcaggggttgcagtgagccgagatcgtgccattgcactccagcctgggtgatagagcaagactccatctcaaaaaacaaacaaacaaacaaaaaagcatgcatggtattatctaccttttaaaaatatatatacatggaaagaaatacaacaggccagccacagtggctcacacctataatcccagcactttgggaggctgaggcagggcagattgcttgagccaggagttcaagaccagcctggccaacatagtgagaccccaaatttattaaaagaaaaaaatacaacaaatgttaccagtgattatctctaggtaataagatcatgggtgatgttttattctttacgcttatctttttttttttgagacagggtctcattctgtcacccaggctggagtgcagtggtgtgatctcggctcactgcaacctccgccttctgggtttgagcaattctcctgcctcagcctcccaagtagctgggactacaggcatgcaccaccatacctggctagtttttgtatttttagtagagacaggttttaccacattggtcaggctggtctcacactcctgacttcaactgatccatccaccttagcctcccaaagtgctgagattacaggtgtgagccactgcgcctggccatgtagtttgttttctaaattaaatatgatttacttgtacaataaaatactttaaaagcacatgtttgattaacctctaagctcccctgctctgtgacttcagagttagtattcttcacacctagcagccatatggaaacacagccaaaggccctaatctttgaattttagtctagtatgagcaaatcctctccacattatttactaatcacttcttaggcacactagacactactcacagacagaatggattccctgagcagttactgaatgtatggatgtttaggttttttatgtgctcaaatccccttcctggacctctctaatcatctctcatttgcagtcttctttttttttgttttttcctgagacacagtctcgctcagtcacccaggccggagtgcagtggtgtgatctcagctcactgcaagctccacctctcaggttcatgccattctcctgcctcagcctcccgagtagctgggactacaggcgcccgccaccatgcctggctaattttttttttttttttttgtatttttagtagaggcagggtttcactgtattagccaggatggtctcaatctcctgacctcatgattcgcccacctcagcctcccaaagtgctgggattacaggtgtgagccaccacacctggccctcatttgtagtcttctatactataagtgatttgccacagaaagaccaaaaactactagaactagcctactacaaatgcctggattcaaattaaaattggttttttttactgcttagtaatcttttactcacttcttaatgtccacatttgttgttccagaccttcacttgacattaacccacaatcccatctgcctctaaatctcattattcattaggccgcatctcctaaatgtgtttaatggttgatattaaggtttctctgaaacctcaagtttaagattacaatgagggtgaaacaaggataaatacaaatgtaacatttaaaatcaactacctgtacaatgtcccactttaaggaagagctggtaaatgggtggcaagaagatatagtaacagttaagttcattaaggtaactggaaaagcatgtatattaatatatctaactatatcacctaactgttacatgtagataaagctaacctaattgtacagcaatgtaatgagtctgaagaaagaacagtataaatgaagacagagaacctacagagaagatagaaaagagcaaaaatttggctagttgtcttttgtatgtgatctgtccaataaacacaagcattccagtctgcttagggtgaatatccttgggcagaatatacatatatgtatatatatgtgtatatatatatatatatacacacacacatacatatatacacacacacatacctacatatatacatctaactgaaatctttcttgaactttaaacccatttttcaaactgcttacgtgaatgccccagagatatctcaaaacaagtacaaaattaaattcattatcccatctagcaaacctgctcttccctctactattctctaccttgacaaatagttttataccccacatctgggactaacccttgattcttcccttctatgctaccctttgatactactgatatccaatcaatcaccaagttcattcaaacaaataaattttaaaaagttcattcaaacttggtgattgaatactattttgatagtactgatatccagtcaattcaccaagttctactttgtctatcactttaatctcattcgttgccattaccataaattctattttattttatcttattattttttgagatggagaatcgcttgaacctgggaggcggaggttgcagtgagctgagatcacaccactgcactccagcctgggtgacacagcgagactctgtttcaaaataaataaataaataaaataaagataataatctccttaatagattattatgatacaaaacgcaagtaaagtgcttacaacagtatctggtaaagtgcttacaacagtatctggtaaagtgcttacaacagtatctggtaaagtgcttacaacagtatctggcacatagtactcaatgcattttacctgctattatcatcatcatcaacaccatcattaccattcaccagactataagctcctgaagagcagaaaccaggtcttaattcatccttgtgtctctaggcacatagcactgtgcctggtataagaagaatcagtaggtattctattttgaactcaccctatgtccacatcatcctagtaaaccctgactgatggctggtcacccttcctagataaggtctgcctcatttctctttaactgcaaagaaacagtccaatactgtcagttcatacaatgtccttaatccccaccaaaacacactgctgtctctaaatgtagtttcattcagccttagagacctatccgcatccccttccttctctaaagctaatccttctctaaaaccagcatttctcctgcaccctttaggtattactgtcattcttatttaatatcaagaaaacagaggtctagagaggttacacaattctgctagtgactggcagagccaggtttgtccaacttcaccatctagctgcttttccagtttggacactctgaataatattaaaaggcagatagacaaaccaggggaaagtatttcaacattaatgaaattaaaaaagtcaaacactgtaatggaaagatgaacacagaaaaggcacaagcaattcagaaaagaaaatacgttgataactacaagcaaataaacatgttcactcttacttagtaattaaatgcaaattaatataagaaatcatttctcacctatcaaatcagcaaggattttatttacaattataaagggctggacaaatgagtattttccctctgggttttttcaattttttttggtttttaatagagatggtgtctcgctatattgcctaggttggtcttgaactcaagtgatcctctcacctcagcctcccaaagtgctgggattacagacgtgagtcactgcacctggtcgcaaataagtattttcatacagctggtgggagtatatgtggagggcatttcataatacatgacactaagtcttaaaaatgtatatatctctttgctataataatcctacttccaaaaatttatcctaagtaaataattatggctgtgataacactgtgataaacgatattgtagctatttttttgagacggagttttgctctgtcccccaggctggaatgcagtggcgcgatctcagctcactgcaacctccctgtcgtgggctcaagcgattctcctgcctcagcctcttgagtagctgggattacaggcatgcgccaccacacttggctaattttttgtatttttagtagagacaggttctgctgtgttggccaggctggtctcgaactcctgacctcaagtgatccacccaccttggcctcccgaagtgctgagattacaggtgtgagccactgtgcctggcctgtggctatctataacagtagaaaaactggaaacagaaataacataaatgtctagcagggaactggctaaataaatggagaaaacatccttcactggccgggctcaggggtggggctcatgtctgtaatcccagcagtttgggaggctgaggcgggtggatcacctgaggtcaggagttttagagcctggccaacacggtgaaaccccgtttctactaaaaataaaaatttagctaggcgtggtggcacatgcctgtaatcccagctacttgagaggctgaggcaggagaatcacttgaacctgggaggtggaggttgcagtgaaccgagatcgggccattgcactctggcctgggcaacagagtgagactctgtctcaaaagaaaaaaaaaaaaaaaaaaaaaaaaggccaggcacagtggctcaagcttgtaatcccagcactttgggaggtcaaggcgggcagatcatgaggtcaggagttcaagaccagcctggccaacacagtgaaacccccatctctactaaaaatacaaaaaaaaaaaaaaaataggctgggcgtggcagcatgagcctgtaatcccagctactcaggaggttgaagcaggagaatcgcttgaacatgggaggcagaggtcgcagtgagctgagatcgcaccactgcactccagcctgggcaacagagcgagactccatctcaaaacaaacaaacgacaacaacaaaaatccttcactttataggattgttgcaaaggttacattaattgagaaaaagcacttaagataatgcctgacatatatgtatgtaataaattatagctaatattatagcaaatttataagaaatatatagccattaaagttatattgctgatgacataatacagtaaaattaaaagcaggttacaacagagtataaagacccaacatttgtttttactatatacatgaacacataaacacttatgcaaagtattggtctatatgtgtgttaagaaactgaagaattttttttaatgtgtatatgccaaaatgttaagagtggtgatctcttggtggtatgattttactttgtttgcaattttcatagtttcccatatattttaataagtatgtgttactctttttttggtttgttttgttttttgagaccaggtcttgctctgttgcccaggctggagtgacacaatcacagctcactgcagcctcgatctcttgggttcaaacaatcctccctgcctcagcctcccaagtagctgggaccacaagcacatgtcaccacccctgcctaacttttgtatttttgcagagatggggttttgccatgttgcccaggctggtctcgaacctctgggctcaagatatccacctgccttggcctcccaaagtgctgggattataggcatgagccaccatgtccaggtgcatatgaattacacttttaatgagaaagataaaaatttgggggactgggcatggtggctcatgcctgtaatcctagcactttgggaagctgaggtaggtggatcacctgaggtcaggagttcaagaccagcctggccaacacagtgaaaccccatctctattaaaaatacaaaaattagccaggcacggtggtgcgcacctgtagtcccaactacttgggaggttgaggcaggaaaattgcttgaacctgggaggtggaggttgcaatgagtggaggtcataccactgcactccagcctgggtgacagagcaatagtccgtctcaaaaaaaaaaaaaaagttttgtgggggatgggaatttaggtagttgtattcctttagaagaaacaagaagtattcagtttgcctatttggtcaaagacgaatactcaacataaatttatacaataactaaaataatcatgaaagaaacacttgtttcacattatgaacatttaagggtctaaaaaaatgacaaagaagaagaaacaaagaaatacaagagaaagagggaggaaggaatggggagaaaaacacacagggagacaggcagagaagataagggggatgcagaggcagagacttaagtgctagaggttcctttcaattctgtgacagttaccaagcatctatgtgccaagcagtgtgtgtgaatatgacacaacttccgccttcacaaaaaacttatgttctggccaggggtgctggctcacgcctgtaatcccagcactttgggaggctgaggcaggtggatcatttgaggtcaggagttctagaccaacctcatcaatatggtgaaaccctgtctctactaaaaaaaaaaaaaaaaaaaaaaaaaaaaattagccaggcatggtggtgaactcgcgtaatctcaactactagggaggctggggcaggagaatcacttgaaccccgggaggtggaggctgcagtgagccaagattgtgccactgcactcagtctgggtgacggagcaagactccatctcggaaaaaaaaaaaaagaaagaaaaccaaaaaaccccccaaaacttatgctgtttagttccatgttttcttgccgtatcacacacaaaaaaacctgaaccctaaaaatgacactagaactaagagcctatccaaaagccaccaaattataaggagaatctgttaactattctgatgtatcctgctatccacttggctatatcttcaaagttatcattttcttttcaggtctaatttaactaataaaactgctctcatgactcttcatctagactaaaaatccttaaaatctgagggtgctctgttctgaatgagaaagaagcccattaggtaggcatttttctttgggcttcaacagagaactgggaactaaagagatccagccatgggcagaatttcctcaccactagttaagtaaaaagaacagcaggctaagcaagataatctctgttgttcttttttttttgagacggagtcttgctctgtcacccaggctggagtgcagtggtgcgatcttggctcactgcaagctccgcctcctgggttcacgccattctcctgcctcagcctactgagtagctgggaccacaggcgcccaccaccatgcccggctaattttttgtatttttagtagagatggggtttcaccgtgttagccaggatggtctcgatctcctgaccttgtgacccacccgccttggcctcccaaagtgctgggattacaggcgtgagccaccgcgcccggccctctgttgttctttctagctccaccactctgtagactaatggaacctggaatcctgtgattagattttatttagaaacctgaaaaatgtttcatcctgttcaatttatgcaaagatggctaatcccagaatatcaagtttagactgagatacaatgatagtgtttatgggggagctattattttagccagttccctggaagcaggataatcagatgcttgtaaaactcaaatccatgctatggaacatatgctcctaaaaccacaaagtggttaaaatattaattaacctcttggaacggatgtgttcctgaaaagtagtgaatcttggtaaatcatatcaaatcaaacttaaagaacaatgagaggggctgggcttggtggctcacacctgtaatcccagcactttgggagactgaggcaggcagatcgcttgagcccaggagatcgagaccagcctgggcaacatggtgaaaccctgtctctacaaaaaatacaaaaattagccaggtatggtggcgcacacctgtggtcccagctacttggtaggctaaggtgggaggatggcttgagcctgggaggcggaggctgcagtgagctgagatcgcgccactgccctccagcctggataatggaaaagagaccctgtcttaaaatgaaacaaaacaaaaaacagagagagaggggtattctattaaagcagtcagtgtcctccatccttttaaggcccagaaccctttccttaggaaaataacatgcacatacacaaaagaagtttcatacaatttcaggagtttctgaaccccacgtaaagaccccattgtcttaaaagagctcaaagtaaaaaggcactcacaaataattcttttttaaacaatcagttattaaagttaaatttttcagtatcactaatctatatttttacatattaggtttatttaaagtgggatttttgctttgaatgcaaatttgtggttttgatttttttaaaaaacagacccacagatgatcatcaacaagtgcttgagacattatctgtacctttcccaagaaattcttaccagtgtgtgttttcatgtgttcgtcgaagtactgcttcatgttgaaatccttgccacaccactggcacatgaactgtttgtgcccaatatgaatgctcatgtgggagcgtagctggtacttgtactgaaacctttcgtcacagttctgcattggatacagtggagatttttgaatgccaagcatagtagctttacctgagcccaccctaacacagtctctgatactaggcttatttttcatattcaaaatagaacctgcttgtgtcagctatttggctttgctatatttctgcaggtgagttactaataaaagggaaatttcctcacaaaattatcattgaagtatactcgacttctcagaatcactgagaaaagaaaaataagtcattatgtgttatttccaagttaacctaatctaagagagttaacagtgtgttaaaagtgacatttttctaccttgcagtgacagcgcacacagagctcagaacacatgtctgaaagttctgtggaaggcagccttgtgcctcctgctccagcacacctctctctcactggtccgccatctatgcaaacactagcccctaggcctgggcctgtaggtagcacattccttacctcgcatctaaagggcttctctccagaatgctgcaaggagtgcaccttgagtgacatactgcgtttgaatgattttccacaggtttcgcatgtaaatggcatgtcttttgtgtgtgctgcaacacagaatgtacttagtgtcaaaacaaaatccaccaaaaagctcaaactaaaaaggcatcctactgtaaagcaattaggccatcctaattttctacactgatttgtgaggcttttttttttttttttttttttttgagatggagtcttgctctgtcgcacaggccggagtgcagtggcgcaatcttggctcactgcaacctctgccccctgggttcaagtgattatcctgcctcagcctcccgagtagttgggattacaggcatgcgccaccacgcccagctaatttttgtatttttagtagagacagggtttcgccacgtttgccaggctggttccgaactcctgacttaaagtgatttgcctgcctcagcctcccaaagtgctgggattacaggtgtgagccaccacacctggcctttgtgaggctctaacagtaatgtctgaagagaaaataatgttgaaaagaaagctgggtgtggaagactataccatccaatttggtgatacttactgaagacataatgcattcagtttcaacatgtcaaaactgattagggcaattcctcatatcctgcccaatccagggcataaagcacacagaagaacaagggaaaattataggtataagagaaaagcagaaaaacttaccaaccatgtgtttccgcacatgagccatggtatagaatttcttctcacaaatttcacaggaaaatttcttttctgcatatccatggacgatcttgatatgttcatgaagggaccagagtttcttgaacgatttgttacaggaaacacactgagcaggataaatagaaataatatttataggggcttacagcatgccataccagcctactggcagaccaaacggatgtgctttaggttcatggcacaaggccagaatccagataagtgctattcttccacagagcccagattccaacaccaacatctgtatgttctcttttctaagatgcatcttttagacactctttgggagtatgaaaacaatggcaaaaactaagacaaaaagtggaaagttccactaacatcaaagaattcactgctattatgaagttagtattgtacctatgaaaagaaacttcaagtttgtttatttatttgagacagagccttgctctgtcgcccaggccggagtgcagtggcgcgatctaggctcactgcaacctccacctcccgggttcaagcgattctcctgcctcagcctcccaagtagctgggattacaggtgggcgtcaccattcccggctaattttttttgtatttttagtagagacagggtttcaccgtgttggccagggtgatctcgatcttctggcctcgtgatccacccgcctcagcctcccaaagtactgcgattacaggcatgagtcaccaagcccagccaagttttttaatttttaaacagaagttgcaagacattcgagttttaaaaatatatgtattaagcaagtgtggctgcctcctccacatcagttagtaaggttttaccagagaatataaactaattttaaattagtgtaataaaaacaagattaaacaaaatacatattagtggtataggtattataggtatgtagaaatataaaaatgtttttatgccttagaaaatgcatttggagccaggtgcagtggctcacgcctataatcccagcatttcgggaggccaagacaggaggatcacctgaggtcaggagttcgagaccagcctgaccaacatggagaaaccccatctctactaaaaataaaaaaattagccgggcgtggtggcgcatgcctgtaatcccagctactcaggaggctgaggcaggagaatctcttgaaccgggaggtggaggttgcagtgagccgagatcgtgccattgcactccagcctgggcaacaaagagcgaaactccatctcaaaaaaaaaaaaaaaaaaaaaaaaaaaaaaaaaaaaaaaagaaaagaaaagaaaatgcatttggagcatttattaatacgaataattgaaatgttatatttcctcaaatctaatttatactttcaaacacgtccctcgggcagaatataccctctgaactcttagtattactctctctcctttttaaaatcattattattttttttgagatggagtctcactctgtcgcccaggctggagtgcagtggtgtgatctcggctcaccacaacctccaccgcctgggttcaagcaattctcctgcctcagcctcccaagtagctgggactacaggtgcgtgccaccatgcctggctaatttttgtatttttagcagagatgaggtttcactatgttggccaggctggtcttgaactcctgaccttgtgatctgcccgcctcagcctcccaaagtgctgggattacaggtgtgagctactgcacccagccttactgtttctttaaaaaattaaagaaaatttttttagtctaaactttaattaactaaagcctataccttttcccttacagatcagttccagagctctcttgtaagaatctgtagaaaacacaccacactgcctagttccttgtatcatgaatcattaatagcctggaatattaggcataatgtgtatcagagtatttctggttaaagcaaaacaatactagaaagctcttggtaatcattagacccttggatacttaagggaacatgttaatattcactataaataaagatctctaaacatcattgtcacttcaggtaacaagaactctgagaagagttaaaagataaacctctggttggaaaatgctctagaaaaggacagactactactatcagccattttgtagggcaggttttttgttttgtttttagacagtctcactctgttgctcaagctggaatgcagtggtgctatcatggcttactgcaggatcaatctcctgggctcaggcaaccctcccaaagtgctgagattacaggtgtgagccactgcacccggccttaggggagggttttagtttgttttttttttttttttgagacggagcttcactcttcttgcccaggctggagtgcaatggcacaatctcggctcactgcaacctccgcctcccaggttcaagcgattctcctgcctcagcctcctgagtagctgggattacaggcatgtgccaccacacctggctaattttgtatttttaatagagatggggtttctccatgttcgtcaggctggtctcgaactcctgacctcacgtgatccacctgccttggcctcccaaagtgctaggattacaggtgtgagccactgcgcccggtctgggttttagtttttacttgttaccaagtcatcaggattattaggagctatacataagaacaaagtacagtgttctttatgaatgtgaataaagttcatttagcagaatccacaaaacttaaacacaaatttaaaagtagtatgatgaagaatcgtgaggaaagtcacacacaaaaagtatttattaaatgttttctgtaacttaaacagacttaagttaaaaaaaaaaaaaaacccacaaaacctatatataaagatcaagaacgctttcagtaatggatcattacagaatccaagtttgacccctagagtgcagcagtgcaccacactccctttggcctgaagtgctgcaaacaattcatacccaagccagggcactggcagttaccggaggatatgggctccatgactcagtcttcttttatttacccagcgtgttggagatcaagtcacaattggtgaatcaaaagcggtgaatttttagcaaatgcaatttccattttttaaaactctttaaagtagagcaatgatctcagatgttgattaaaagcaacagaagaaaagtgaaacttaaaaagtgactaccaatattagaagcacaccaaaaaacaaaccaaaccaacacaatttatcctttataagtttagcttaaatatggtacaaaatatttctgttacatatcttatggagacatgaatagacttacctcttacgaatattcattaatatgcattcacacgtgcaaaccaatataactgcaatccacttgacataatataattagcatacctctttaacctatcacaatatagtcctttcacgacaacagcctggtttgaataccgttattttgttaccttaacaatactgtacagtggcattatgtaaccctactgccaggtgggcaacattttcgaccagctcagcctctgcttaaagtttgcatattcccatgggctcagcctcttggcaaatttagtgttgtcatctctccaatggtaaaagcaaactcactgctgaagatcttccatttccaccggtctgagtcattatggtttttgtccccatcagctgtactagaatctggcatccttgtaaacccagaaagggacctttctctactcctaacctttaatcagtaactcctacctccacagagaagatgccagaatgaattctattacacgtcctacaacagtgaatctcagtgcaaagttggtgttgattttaacctcctggtcaatcaactataacagatcccccttccagtgtgcctgggttcccactagtccagcgtcaaatttaatgcttttgaaataaaagccttggtttagaaaagaccaaagcaggagcttttcaaatgataaattggtgaaaactgtcccttcagcctctattgcatttattctcttgggcggataccagatgaatctgaacagccaggttctatcctgaaaagttttccctctcggtgatgaaacctacctgaatgtttttttcacagtctgtttgctggtgaagggacagctcactttccaggacaaacttcttgccacatttatcacaaatctgcatgcgcctatgagtaacgttcatgtgcttctccaggtaccagcgagtgttaaataccctggggcacttctcacaggtcagagtctctttctcttcacacttagctttctggactggtgctttgggctcctttgtggcccgcttcttacgcttaggtggctctacactcttcctacgacctcttgtagttctgggagtaggggaagtggtagctgcggcaacagaggcagctctcctggttctcctttgtgtaacgctgactttctctactatcttctcctttttcttctgcttttcattctctccatagtcattgctgtcatctgtggcctcttcctcactctcttcctcttcctcctcactgcttgtcttaagaacaggagtctctttggactgagaagagacacccttttcccctttagatacatttaatgtttgattattaaggtttacctccactatgatctgctcccttttgtaagagacttcttcctcttcctcctctgtgtcatcagaattctcccggtcttccttaacagcatgcacgtcagacactgctcttgtctccctgaaatatggctgttcttctgtttcatggagatgcggtttgctcatcttggtgtccactaacacagaataaggacttcctgattcccttttgtacactttggtggacaggtcaagttcttggttggcaccatgataaaaggaagatggcacttgaccacgacggctatcttcttgtgccattcctgctacatgcacagcacagttttcaaccagctcctgacaagaactggctgtgtggctcattggtaagtggcccaatttattaaacagttcagactataaagaaatagctttaaaacaaggtaattattaagactcaaatcttttctcatccacaaagaatcactcaaatgaaaaaaagatattcctggaaactgtgtgcaattcttccagtgttgcagcaccaaagcatgagtcaaaaaggtttggtattatggcaagagcagagcactagtgatttttcttctgaagagagctgcaagggacttgggagcatcttatctacaaagaaaagcaaagaggaaaaaaatcaggtaataccactatttcctttttagagcatgcatttaaatcacaagaaacagggcttaaataataataattattattattttgagatggagtctcactctgtcacccaggctggagtgcagtacgcaatcttggctcactgcaacctctgctgcctgggttcaagtgattcccctgcctaagcctcccgagtagctgggattacaggcgcccgccaccacacctggctaatttttgtatttttagtagagacggggttttgccatcttggccaggctggtcttgaactattgaccttgtgatccacctgtctggggctcccaaagtgctgggattacaagcatgagccaccacgcctggccaaaattattaaactctttacatatacaatgcttttaactgcttaaatgtttcagtatgagccattattttactggattacaggaattcataaacattttctgttagactataaattttacaacagcaaaagccacatctgtccagttcactgagatatcctcagagcttagcacagtgtctagcatacagtatatatttgatgaataaaataatattgcacagcattcattttcctagatactacgcaatatgctgatatggcaaaatatacggtctctatccacaagatctttacagtctagtttacaacgtgttgggcatgaaacacgcaagagctttatattggctgactttctttcaacatcaatcaccatgtccatcacagtgagagctcgcagaacaaagggggtagtggggcaggcattgtggtccccggaaataaaacagctaattgacataactatagaagagaagaaaaatgtccttggccttaaatcatttataatctaggtttaaatataattgttttcaggtttattggagtaatttcaaagttgccaaatattttaacatttgttctgtgcatagctcactacattcactcagtaagtcggtgattttttatatgtcagttgcacaggagtctaaattctaagaaaccataaccatgaggttgatatggttccaagaaaaataaaaccatccaatattaatttttaaaaagcttagaagggcatataatttgctttgtgacatacctcacattgctgtttagccaacccacctatcctcttgagtcatatgaatattaccgtaaacacataccctgtctagttgacaaaaggaaggaaatgagtatttattaaatgcctgctatggacataggcactataatagtttttattgttcattatttatgtttaatacccaccacaaaactgtggggttgaatttttttttttttaagacagtgtcgggccaggcgcagtggctcacgcctgtaatcccagcactttgggaggccaacgtagtcggatcacgaggtcaggagatcgagaccatcctggccaacgtggtgaaaccccatctctactgaaaatacaaaaattagctgagcatagcggctcatgcctgtaattccagctactcaggagacggaggcaggagaatcgcttgaacccaggaggcggagattgtaatgagctgagatcgcgccactgcactccagcctggcgacagagctagctagactctgtctcaaaaaaaaaaaaaaaaaaaaaaaaaagacagggtctcactccattgcctaggctggaatgcagtggtgcaatcatggctcactgcagcctcaaccttctggtctcaagtgatcctcccacctcagcctcctgaacagctaggaccagaggcatgcaccaccacacctggctaattttcaaaaaaatttttagagatggggtctccctatgttacccaggctggtgggactgatttttaaattttttatcaaaataatcattttaaaaattcatagtcttacaattcaaatgtattggccgtactccaatttatctcagtcccatttcctggaggcaataatgctgttttagctgcccccctctccatttaattctatatttctacataatttgattatgtttctgtttctggactttttatttcaatttcagatattaccttgtctttctctatagttttcttaccttattgttcccaactcttccctcatgctcccaatagttatatcacaactttgaaaaaaatcagtatttattattactatgagtagttcacaattatttctatcactcctatgctaatcctttgtcttctcttccattttctcttccatttcctttttccttgtgagtttattctttttcaaaaaaattacttttgctttcatggaatttcaggaaggagtggtaataaatgctaccatgttttacttgacatttgaatagatatattcctactttcttgtatttataaatggtaaaattacggctcagagaggcaacataatttgtctaagatcacaagtcgctcaaacgacagaggtagtatttgactccaggcctgcctgactccaaagctcattgtctatttctactatgacaaatgacaccttgaaataatttaaactcaattattcttttaactgcttatctttttgtaccagtttcatgcctcatattttaagtaggaaaatcctagcaaccttattctacttgtgccaaaacttctaacccatggaaacaatgtgaactactatgagtatcatttaaataaactcatattatctcaaattaagtaagggaggaatgatggtaaaattcaattaactagcaaaagctaggagttaaacaaaaatcagaaagtcaaagaaaagaataaagagtaatcattaattcattttccaaatatttctggctctcggctttctgggcacatggtaggctatttttttttggagacggagtctcgctgtcacccacactggagtgcagtggtgcgatctcgtctcactgcaaccacgcctcttgggttcaagcaattctcctgcctcagcctcccaaagtgctgggattacaggcgtgagccactgcacccagcctaggctacacttttaaaaccacgcccacaacttctattccctgtagttagatggggccctgtgactacttctggtcagcatattatgagaagtgacagagagaggcagggcatttactaaccaatataaaatccttaagacctcttttccttctggcacagtggctagcaatcttccaggtgatggttgctctcagcttggtcccctaagatgacctactggatagacatatgtattttcttggtgttttttgttttgttttgttttgagacagaatctcactctgtcacccaggctggagtgctgtggcatgatcttggctcactgcaacctctgcctcccgggttcaagtgattctcctgtctcagactcctgaatggctgggactaccggcgcccaccaccacgctttttttttttttttttttttttttgtatttttaggagaggcagggtttcaccatgttggtcaggctggtctcctgaccacaggtgatccacccgccttgacctcccaaagtgctggaattacaggcgtgagccaccgtgcccagccacacagtgtgttttcaaagccactgagaccttgcattgtttattaccacagcataatttggcttatccaagctgctacgagtagaaaccagaagtggggtgctgccttaccaaaaagcctaaaatatatgatgaagccttaggagctgggtggaaggaggcaaggaaagttattggaggctaaaagattagcaacttatattatgcagtgatcaaatgatcagtgaaactatcagctatcgcagaaggtagatattataccataagagctagcagctctagtgggaaaatggactattacaagtgtgttgtattgtaacactgttagttatatttaacaaattattacatgaaaaggatgaattcagaaaataatgatcagtttataatcaagaataaaagaaatccagaaagtcagggatttgcagagtaagaacaggcaagtgcttaatgtaaaactgaagtctttgatttacaaagcctgaatataattcagtcttgaggcaaggttcaaatcaaatatttggctttcacaatcactgattaagatggtactcaataaaatagcttttctaaagagactaaagatgagttctgctacaatgcatatttctctaatgtgaattaattcaaatgctattagtaaatagggaaatgatagcagaataactcagaaataatgttagtttatacaagattttcccaagtttaatgtctgaagtgatcaggagcaagctttctcaaaattacaaagaaagcaagccttagcaatacacgaagacctcaagaaaaaagctaaacactctacttctataccttcctttaaggcaagcaatggttcattcagtggcttcatgaacaaaactctttccactttatatttgatgaagctgagagaacagtcacacctcagagatattgccggttcggctccagaccactgcaataaagcaaatacctcaataaagcaagtcacacaaattttttggtttcattgtgcatataagttatgtttacattacactatagtctattaagtatgcaataactttatatcttaaaatcccagcactttgggaggctgaggcaggcagatcacgaggtcaggagatcaagaccatcctggctaacatggtgaaaccccgtctctactaaaaatacaaaaaattagctgggtgtggaggcaggcacctgtagtccgagctactcgggaggctgaggcaggagaatggcgtgaacctgggaggcggagttggcagtgagccaagatcgtgccactgcactccagcctgggtgacagagcaagactccgtctcaataaataaataaataaatgttaaaaatgttagcgattatctgatccttcagtgaatcaatcattttgccgatggggggtcttgcttcaatgttgatggcttctgcatgatcagggtggtggttgctgaaggctggggtggctgtggcaatttcttaaaataagacaacaatgaaatttgctgcattaacttattcttcctttcataaaagatttctctgtaggatgtgatgctgtttgataacactttacccacagtagaacttctttcaaaattggagtcaatcctctcaaacccagccactgctttatcaactaagtttatggaatgaatattctaaatcctttgtcattccaataatgttcacaacatctccaccaggagtagattccatctcaagaagtagattccatctgtttgggttttatcaagagatggcagcaactcagtcaccttcaggctccacttctaattctagttctgttgctatttccaccacatctgcagtgacttcctccactgaagtgttgaaaccctcaaagtcatccatgaggcttggaatcaactcctctaaactcctgtttatgttgatattttgacctcttcctatgaatcacaaatgttcttaatggcatctagagtggtgaatcctttctagaagattttcaaattactttgcccagacccatcagaggaatcactatctatggcagctatagtacaaaatcaatttcttaaataataagactaggaggtaaaaattactcattgatccatgggccacagaatgaatgttaaattatcatgcatgaaaacaacattcatccccttgtacatctccatcagagctcttgggtaactaggtgcactgtcaatgagcagtaacattttgaaaggaatctttttttctgagcagtaggttataacagtgggcttaaaatattcagtaaaccacgctataaacagatgtgctgttattcaggctttgttgtttcatttctagcacataggctgagtagatttagcatcactcttaagggcctctggatttttggaatagtaagtgaacaaggtggcttcaccttcgagtcaccagctacattagcccctagcaagagagtcagcctatcttttgaagccaggcattcacttctgtcaatgacagtcctagatggcatcttctttcgatataaggcattttgtctacaccagaaaatgatcttagctagatctggataacttgctggagcttctacatcagcacttgctgcttcaccgtgcacttttacgttatggagatagcttctttccttaaacctcatgaaccaacctctctgctggcttccaacttttcttctgtagcttcctcacttctcggccttcaaagaagtgaacagagttaggaccttgttctagctttggcctaaaggaatgttgtgtttggcttgatcttccatccagaccactaaaccttctccatctcagcaataaggctgtttcgccttttttattttattttttttttgagacggagtctcacctgtcacccaggctggagtgcagtggcgtgatctcagctcactgcaacctccacctcctgggttcaagcgattctcctgcctcagcctcccaagtagctgggattacaggtgtgtaccatcacatcttgctaattgtgtatttttagtacagatgatgtttcactatgttggccaggctggtctcgaactcctgacctcaggtgatctgcccactttggactcccaaagtgctgggattacaggcatgagccaccacacccagccagctgtttcactttcttatcattcatgtgttcactggggtagcactttttttttttttttttttttttgagatggagtttcactcttgtcacccaagctggagtgcagtggtgcgacctcagctcactgcaacctccacctcctgggttcaagcatttctcctgcctcagcctaccgagtagctgggattacagacatgcaccaccacgcccggctaatttttgtatttttaatagagactaggttttaccatgttggccaggctggtctcgaactcctgacctcaggtggtccgcccaccttggcctcccaaagtgctgggattacaggtgtgagccactgcacccggcccactggggtagcacttttaaatttccttcaaaaacttttcctttgcattcacgacttgatagtctggcacaagaggcctacgttttggcctgtcttggcttttgacaggccttgctcactaagcttaatgatttctagcttttgatttaaaattagagaggggtgactcttcccttcacttgaccactgagaggccactgtagagttattaattggcctaatttcaatattgttgtatctcagggaataggaaggcttgaggagagggagagagatggtgtaacagctggtctgtggaacagtatgaacgcatataacatttatcaattaagtttgccatcttatatgagtatggtttctagcaccccaaaacaattataacagtaacatcaaagatcatttatcacagatcactgttaacagatatcagtgtttgaaatattgggagaattaccaaaatgtgacacagagacacaaagtgagcacatgctggaaaaatgatactggtagacttgctccatggatggttacaacaaaccttcaatttgttagcaaagtgcaataaaacaaggtaggccttcagcctgggcaacatggtgagatctcgtctctacaaaaaaaaaaaaatacaaattacccaggcatggtgctgcatgcccgtggtcccagctacttggaaggttgaggcacgacaattgcttgaaccaggaggcggaggctgtagtgagccaagactgtgccactgcatgctactgtttttattatggttaattttattttctttaatttttttacttttgggggtttttccacaaagaccagaaaacctgctagacaaattctagcagagttgaaacatttatttttgtttttattagtgcaaagactatggtgttccacagatttagagtggtttgcctcaactctatttttcccataagtcctgtttactttagtgcacgattttgcagaatgggggcttttcggaaaagcatatatggcagtatagcagaaacatctgtactcaaaattaagtcaaggaagaagtatgggaccaataaagcagagctatgtagcaaacataagtatgggccaggtacagtggctcatgcctgtaatctcagtactgtgggaggccaaggtgggagaattgcttgagcccaggagaccagcctgggcaacatagcaagaccccatctctaaaaaaaaaaaaaaaaaaaaagaagtatggtaagaaaagaactgtggatgtggctagagaacctggagctgacaggagacaagcaaaaagccaactcagttttgaaagttatactgccaaaagaacaaccagcttgggctaagagagactgtcactgttcaagaccaaagtgatctttgggttctcaagtgtcaatgacagaaagtaggctaggaaaggtattcatcctcctaagggggtatatcccccattgtatattttggacatggccaagaaaggtaatagaaacaaaaaagaaaaaggtggtccatgaagatgaacctagggaccaaagaaaaaaccgacatgtgaactactcctcaggggcaaaatcaaggcctgtccaagaatattccccacccctggagagggccttctcaatgacagcacagagggatttcagaatttgttgcagctcatcaactgctctatgtctcctattcatactcctttcaaacaggagtacttatttttattatcttttcactattcactattgtaatgtatactgtattgggggcagcagatcacttgtcaatttctttcatggatctctggatcaagaagagcaacgtctggacccaatgtagagactgctacgcatcaccttctcttggtgatgccaccaagcatcacactgttgcatcactgaggtcctagactttgagcctgatgccatgatttgatattgtcagtccataaattttaccaatctataccttagtaaactcctagtctgaaaagttggggccaagaaactgtactaaaaaactgaaacgcttggtaaattctactctgatttacaaaaaatgcatttggtagtggttataatttgcatttatatgatgctttacagtttacataaagcacatatatagataattttttttattttttcacgagacggagtctagctctgttgcccaggttggagtgcagtggcacaatctcagctcactgcaacctctgcctcctgggttcaagcgattctcctgcctcagcctccctagtagctgggattacaggcgcctgtcaccacacccagctaatttttgtatttttagtagagacgggctttcactgtgtttgccaggctggtctcgaactcctgacctcgtgagccgctgtctcagcctcccaaagtgctggcattacaagcgtgagccactgcgcctggcctacctaaggcatatttatcatataattgttaaacatttatgaagtgcctactatgtgttaggtattgtaggagttggaaccatcaaggtgctcaaagatctacctggggagacagacatgaaaaatatagcatagcagaccaggcacagtggctcatgcctgtaatctcagcactttgggaggctgaggcaggaggatcgcttgaagcaagggagttcaagagtaacctgagcaacataatgagacctcgtgtctacttttaaataaataaatatatatatatatatatatatatatatatatatatatatatatatatattttttttttttttttttagtagagatagggtttcaccatgttgtccaggctggtctcgaagtcctggcctcatgtaatctgcctgcctcggcctcccaaagagttggaattacaggcatgagccatcacacctgtaattttttaaaaagtaaaaacacagtatagcagttaagagcacaaactctgaaaccagactgcctgcattaaaaatctggctctaaaacctcataggtgagtcatgaccttgggtaagttacttctttatgtctcattttctgtatatgtacaatggagatagtcgtagttctacctcatggattactggtataaatgcttatgaaaatacttagcaatagtaagcactattataagtatttgctaaatacactcacctatacacataacatacagtggcagtatgtgaagggaggtggtgaacaggccacgggaagtttcagagatgagataaagctggggctggtcttgaaggacaagcagaagtcagatggagaagtgggaaggtaagaatgttgcacacaaaaaacaccacaggaaaatgacaggaatgaaaccatgtgggtttttttacctacttatgcatgattaccctacaataacttggaatgctgatatggtttggatgttttgtcctctccaaatttcatgttgaaatgtaatcctcaatgttggaggtgaggcctggtgggaggtgtttgggtcatgggggcagatccctcatgaatggcccagtgctgtcctcgaaggaatgagttatttcttgctctgagtttacatgagatctggttaagactgtggcacttccccaatctctatctcttgcttgctctttcaccatgtgatacacctgcttccccctttgcattctgccatgattgtacactttctgaggcccttaacagaagccaagcagatgttggtgccaggcttgtacagcctgcagaaccacaagcccaaataaacctcttttctttacaaattacccagcctcaggtattcctttatagcaatgcaaacagactaatacaaatgctgctcccattttacagctgaggctcaactttcccgttgtcattgctggtaagtgatggaacaagtgtttgaattctgcttttctaactcctagtccaagtttaccacactgtctcctactgagttaatggtaaacaacagtctcaaaagatgtacttaggtttttgaacaacaaaatacctttacaatacaaagcaaataacagaattccagactcatgtttgagggtgtaaattttatccttagctggtgaaactcataccttccttcagaatgtccagaatgttaggttaattcatatggatacatttcagttttcaaactgatccacctgtagtctgggtttcacagtaaccacttttaacaaactaaagactcaaaatttaaagtatatttttagttcatcttcttgcaacaaaatggtaagctttcaaatgggtaaaacctaaataaatttgtcaactttgaattttgtatgtaaagtagaagttatagaaacaaaatttacattgaaaagggttttgttattacagtatcaacgcatatttataaatgtccttcatttccaaaggtgctcacaatatcgacctgtaaatagaaaagctaccaacatcaacttgtaacagtcatcttcacaacaaacaaaaacatcaaatgtcatatatcactgggccttattttggataagcattacaagctgttctcagatgcatacattttatatggtcaagaaacagaactacagtctcatctaataaaaatgtaatatgtcaaacaatttttaagcagtccatctaatccactctctgtaagaagtggaattgagaaatgcttgtcaccttcagttttagacaaagcttttataaaaataaaatttcattgtagttttttacacacgcatttaaatgagactgccattgtgtttcctcaacaatatgcaagtgcaactagtaaaagaggacaaaggagagacgcactcttcctaggtactacctaattaccttcaagcatcaacagtttctacatttccatataagataatacaaactaatgtgcattagtcattacacaagtcagctgaagcaatcttaactttcaccaataagcaccacgcccagggccaaagaagaaatcaaatactaattaagctataccacaggaccgacatgatcacaatgtatattcagaatattttcccattattcaattccattcacaaatgtcatctacagataggagaatataacttgaagcaatttttaaaaagaaggtaagttttgtgtgtactgttgccatcttttctgtcagaatcagacaaagtactggctcaaataaaattcagtgcccttaaaaccaaccagaagaacatatttacaagatatataaccttggaaggtctcagtctagccttaaccaaaggtcactatatggaatgcaattatttttatttttgcaaaaacgtgggctatattattattttgagatggagtctcactctgccacccaggctggagtgcagtggcatgatctcagctcactgcaatctctacctaccaggttaaagtgattttcctgtctcagcctcctgagtagctaggactacaggtgcacaccacagctaatgtttaattttaattttaatttttagcatgactaatttttaattaggtgcatgcctggctagttttttgtgtttttaatagagatggggtttcactatgttgcccaggctggtcttgaactcctggtctcaggtgatccacccgcctcggcctcccaaagcgttaggtttacaggtgtttacaggtgtgagccaccacacctggccaaaatacaattaataaatggagtagtccatttttaaaacagcaactatatcagtatcttgatcgttattaactgatatcctgcctattaactttattaaaaaaaatcagaggccgggcacagtggctgacacctgtaatcccagcactttgggaggctgaggcaggtggatcacctgagattgggagttcgagaccagcctgaccaacatggagaaaccctgtctctactaaaacaaacaaacaaacaaacaaaaaccaaaaaacaaaattagctgggcgtggtgacacatgcctgtaatcccagctactccagaggctgagacaggagaattgcttgaacccagggaggcggaggttgtggtgagccaagattgcatccagcctgggcagtaagagcaaaactccatctcaaaaaaaaaaaagaaaaaagagaaagaaaagaaaagggcttatgaatgtgtcttttttttttttttttttgggacggagtctcgctctgtcacccaggctggagggcagtggcgcgatctcagctcactgcaagctctgcctcccaggttcacgccattctcctgcctcagcctcccaagtagctgggactacaggtgcccgctaccacgcccggctaattttttgtatttttagtagagacgggctttcaccgtgttagccaggatggtctcgatctcctgacctcgtgatccacccacctcggcctcccaaagtgctgggattacaggcgtgagccaccatgcttggccaaatgtgccttttcttaaactcctaaaggtaacaccacaaattagaactgagatatatttatcaggtgtaagtataggtacagatgttcacattgtggctacctatgatataatccactatgagagatgtcaaattgactagatcattgtgaacctgaatttaaaactcatttagaaaatgaaaataactcagatatgtctttattacactcttgtattttataaaaaataaaaaaataaaaaaataaaaatcacaaatattttagatttgtggataacatcagaaaatgctgggaatttattttatacatttggcctacaaaaagacaaaggagtgttattgttttctcattaacaaaaattttttgacacttcaaaaattaacattttgtataaaaattagccatgcatggtagtgcatgcctgtagtcccagctatttgggaggctgaggcaggagaatcggttgaaccagggaggcggagcttgcagtgagctgagatcgcagcactgcactccagcctgggtgagacagtgagacttcgtctcaaaaaataaaataaaataaaatataaaataaaaggctgggcatggtggctcacacctgtaatcccagcattttgggaggccaacacctgaagtcaggagttcaagaccagcttggccagcgtggcaaaaccctgtctctactgataatacaaaaatttagctggtggtggtcacctataatcccagctacttgggaggctgaggcaggagagttgcttgaacacagcagactgaggttgcagtgagctgagatcgcaccactgcactccagcctggggacattgcctcaaaataaataaataaatataacattttgaaaacatcttaactgaactagtcttaaaccaagaggtatgaataaatagtctaaaacaaaaatatttgaaaccaggtaggaagttttaacccaaacataatgtatgcaaaacatagccaacagaaaaagacaaattgctaacacacctctgccttttccttcccataagcctgtatgttccctctccgattcttttgaaatatacaaatcctctctctcccaaaaggaacacacacaattttacaaacaatttcaagggatccacctattcccagaaatccatccaaggattctctaggggtcccaaaaccccaggctaaaaactctcatcacagagcagattttacctttccttgtgatatatatttaactttttttgaagacagaggtcttgctatgttgctcaggctggtctcaaactcctggcctcaaatgatcctcctgccttggactcccaagtgctgagattacaggtgtgagctgctgcacccagcctgtagtatatatttacttagacaaagtttgtaaattaaatttttctctacctctttccttcttctccctacccccttttctttcagtttctccagcatatctatggtcagaaatgaattaacaaaactcatgcctatagtcttagcactttgggaggctaaggcaggaggatcatatgaacccagaaggttgaggctacagtgagttataactgcaccactgcactctggcctgggcaacagagcaagaagaccctgtctgaaaaaaataataaaataaaataattttttttttttgagacagagtctcgctctgtcgcccaggctggagtgcagtggcgcgatctcagctcactgcaagctccgtctcctgggttcacgccattctcctgcctcagcctcccgagtagctgggactacaggtgcctgtcaccatgcccagctaatattttgtatttttagtagagacggggtttcaccttgttagccaggatggtctcgatctcccaacctcgtgatccgcccacctcggcctcccaaagtgctgggattacaggcatgagccactgcacccggccaaaatgaaataatttaaaaaattaaaacggaaagaatatgaagacatttctctaaagaagatatacaaatgggccaggcgtggtggctcacacctgtaatcccagcactttgggaggccaaggtgggtggatcacaaggtcaggagatcgagaccatcctggctaacatagtgaaaccctgtctctactaaaaaaaaaaaaaaaaaaaaaaaaattacccaggtgtggtggcgggtgcctgtagtcccagctacttgggaggctgaggcagaagaatggtgtgaacccaggaggcggagcttgcagtaagccgagatcgtgccactgcactccagcctgggcgacagagtgagactctgtctcaagaaaaaaaaaaaaaaaaaaaaagaagatatacaaatggccaatgcgtaaaggaaaagatgcttaacattattcagcattagtgaaatgcaaatcaaaatctcaatgagataccacttcacacctactaggatggctataataaaaaattggaacacagcaagtgttggtgaggatgtgaagatattggaagcctcatatgttactggtaggaatataaaatggtacactggagaacagtttggcagttccttaaaaaaaaaaattaaacagttaacatatgactcagcaattccagttccaggcataaactcaggagaaccaaaaacatgttcatacgaaaacttgtaaacaaatgttcacagaagcattatttataatagccaaaaggcaatccaaatatacatcaactgatgagtggataaacaaaatatataatcatacaatggaatattatctgctataaaaaggaatgaagaagtcaggtgtagtggctcatgcctgtaatcccagcactttgggaggctgtggtgggatgatcacttgagcccaggagtttgcaaccagcctggtcaacatagcaagacctcgtctctacaaaaagtttttcaaaaattagctgggtgtagcggtgcacatttgtagtcctagccactcaggaggctaaggtgggaatattgcttgagcctgggaggttgaggctgcagtgagccatgatcattccactacactccagtctgggcaacagagtgagaccctgtctcaaaaagaagaaatggccgggcatggtgacttaggcctgtaatcccagaactacgggaggctaaggcaggtgaattgctagagttcaggagttcgagaccagcgtgggcaacatggtgaaaccccatctctaccaaaaatacaaaatttagctgagagtggtggcatgcacctgtggttccaactacttgagaggctgaagcaggagaattgcttgaactcaggaggcagaggttgcagtgagctgagatcttgccactgcactccagcttgggagacagagcaagactcgatctccaaaaaaaaaaaaaagggaatgtagtactgatatgtggtacaagatggaaaaaccccgaaagcattatgctaagtgaaagaagccagacataacaggctacctagttgtatgactctatttatatgaaacagccagaataagcaaatagagacagaaagtaaatcgtcattaacaggagctgggagtagggaggaggggggagtgactgctgatgggctccaggtttcttttgggggcaatgaaaatgttctggaattagacataggtgatggttgcacaatcttgtgaatataccaaaaactgcagacttgtatgctttaaaatgataaattttatagtaaatgaattatatttcaataacaaaatcaaataggctatttggatataaatagttcaaaggtgatctgaagtaataagatcatgtgaaaataaattatgatattttgtataaaatgatattattgatttactggatagctcataaactgcaacctggtcacagtgctgagaatcaacagatctggataggctctatttggaactcttccatactgctgggcaggttatttcacctttctagctctcagttttttcagccacgaactcacgggattcccttccacgactgacatttaatgttctacaagtttgtgctgattatttgtgtctattctgttacctaattcatctggtcacctattgccacacaggtaactcccaacttttcaatattaagggttatcacacaccccttaccccaccctaccccaccatgttctctcttattattaaaaaaaaactgtgtctaagaatttgcattgaggtcatactttatttgttactaatcaaatatatatataacagccagttatgatattttggttacactgtaaagtgttaccataatttcaattcaactctttgaacacaaaaattagcttatgaatctcagtttggagatacttgggttaagaaaacagtccacagtctttaaataaatatgatgcttgatggaaatgaccccacaaccttaaccatggaataggtaggtttttctaaacacaacacagagtccaccacactttcttagggtagacagagatgtgagcacacttaacaccattccttggatgattctattcataatcctctgccttagtcagaaagcatttaaggcaatatgcaaaaaaggatgtagaagaaatccatgaagcctaagacctgtcatatctattgttacctttacttttttttttttgttttgatacagagtctcccgccatcgctcaggctagagtgcagtggtgcagtcttggctcactgcaacctccgcctcctgggttcaagcaattctcctgcctcagcctcctgagtagctgggattacaggcacgcgccaccatgcccagttaatttttgtatttttagtagagatgaggtttcaccatgttggccaggctggtcttgaacccctgacctcatgatctgtctgcctcggcctcccagagtgctgggattacaggcatgagctgccatgcccagccctttttttttttttttttggagacagagtctcactctgtcacctaggccccggctggaatgcaatggcatgatctcagctcactgcaaccgctacctcccaggttcaagtgattctcctgcctcagcctcacaagtagctgagattatgggcatgcaccaccacgcccagctaacttttgtattttattagagacagggtttcaccatgttggccaggctgatcttgaacctctgacctcaagtgatctgcctgcctcagcctcccaaagtgctgggattacgtgagccacggtgcccggccttttacttttttttttttttgagacagagtcttgctctgtcacccaggctggagtacaaagacgcaatctcggcttactgcaacctccacctaccaagttcaagtgattctcctgcttcagcctcctgagttgccgggattacaggcgcatgctaccacacccagctagtttttgtattttttttagtagagatggagtttcatcatgttggatcacgaggtcaggagttcgagaacagcccacctcagcctcccaaaatgctgggattataggcatgagcgaccacacccggccccggcctacttttcttaatggtgtttttttttttttttttttttttaagtatgtaagtcacaggttgagtgaaataaaatctggtaacaatgccacaactgttacattttaacacaacttgttaaaattaaaggtgatcaggcatggtggctcatgcctataatcccagcactgggagccaaggtaggaggatcacttgaagctgggagtttgagatcagcctgggcaacatggcgagatcccatgtctacaaaaattttttaaaaattagccaggtgtggtggtgcatgcctacaatcttagctattcaagaggctgaggtgggaggatcactcgagcccgagagttccaggctatagtaagctatgatcatgctgctgccctccagcatgggcaacagaccaatacccattctcttaaaaaaaaaaaaaaaaagaaaaaagaaaaattaaaggcaaaaatgcccaacaactctgtaggtagcttacttagaacaaaatttaactcaatagaggttttctacactggatgttggcaaactgatccagtggatccttcctcccttttgggaagtatagttgaacacagagaagagactgattactagggtttgagttgttaccctaaatacactgagttacgctttatgaatcttcatgagacatccagtatatctgtcttagaagtaatgggactctgtgttactaaaactactgctactcaaacaagggatttatttattttttatctagaggtaaataataaacaaggagcccatgtcttcttttttccctgaatgcagaaattcctttttcttttctaattaaaatgtgaagtttataggtctcatgggtttatacactaagcgctgtctgtccaattcctacattctattcatgcatttacaagctttgattattatctacatgcaaagtaccaagaggctaatataaagagaaaatatttattctttaaaataatcattgcattgaccctcaccttcacaagcttaaaattaggttgagaagcaagacctatgcacaaaaaataagtcatgattgccaaatacaacaattttttgtttttgagacagagtctcactccaacgctcaggctggagtgcagtggcgcgatcatgactcacttcagcctcgacctcccaggctcaagtaatcctcccacctcatcttcctgagtagctggcacacgccaccatgcctggctaattttttttttttttttggtagagacggagtcttactgtattggtctgcccatgttggtcttaaactccttgcctcaagcgatcctcctgcctcagcctcccaaagtgctgggattacagcgtcagccactgcactccaccagtttctgaactcttaaaaagcataagaatgagaaccaacaccttctgctagatgtcaccttgtctggatgtgatgcatggaactgtggtaaccatcttgcatctataatgtgtgctggccaaaagacaaggcagacatgttcaagctggcagagcagaagggcgaaaagaagaggggtcctgactgatgtcactaaaccacagatttaaaccaaccctagactgaggcgtcttgttacttgtaaggatatattttccttagtttgaattactttgaattggattttctattacttgaagtctacagcatcctaataatgcatacagtcatgtttgagatgcaaattagacaattaagtagagttgtccaatagccaactggatagaagcacctgatcaaaggaaaagtcaacactatagctacatatttaggagatatcagcaaacagaaagaatttacatttgggggctgaggagacaggataaacagaaaagaaggggctgagcaccaagccttagggcaccccaagggcagagaagaaaaggataacaatgaagaaagaagaaattaacagtgaggtaaaacaaaaacactaaagtacagtgcacagaagccaagagattaaaaaagacagagaaaaatgaccactgaattcagtgactcaataattccttaacatgaaggtccccttgtccttccaccagcctcctcctctctgaaaaaaacaccagacttcattagcataatggttaagggctcagacttgggcggacttctggagctatcactcactagctgtgggtgatacttaaccagccacactagttaaaagtgtgatcaggaggggaatggaagctgaggaacagagctagagtagaactcaaaacaaagaaaaggtctgagttaggaaattttttttttttttttttttttgagacgtagtctcactctgtcgcctaggcttggagtgcagtggcatgatctcggctcactgcaacctctgcctcccaggttcaagtgattcttttttttttttttttttttttaagtgtattttccatttaatgccccccatgttatttcaggacctatttaaaagtaataacaaaaagcaacataatccaaaattacatgttttattttcatgtttgtaaaatgaagaggtttttttctggatggttttcttatcagcttttcacataacagtcaagtaaacctcgtggcactagccagaaatcgttgcaactttggaacttccaagacaatctggcctctatcaatgggcagacagcgaccctcattcaaaatgaagctgctagtcagtgacatccgacattatcttcactggctactcgtccacactcagaatgctgtgaagagtgtcaggttttaaccaagcgattttccattaaatattctcccagatgttctggaattttttttgtgtatttttgcatcttcacagagctgctccgctgtgccactgaagacagagccattgttcctgccacacgaccaaacgatcgcgaaggccgatgtaaaagccaagagattcttctgcctcagcctcccgagtatctgggacaacaggcacatgccaccacgcccagctagtttttgtatttttactagagacggggtttcaccatatcggccaggctggtcttgaactcctgacctcgtgatccacctgcctctgtttctcaaagtgccgggattacaggcgtgagccaccactcccagccttgagtttggacttttaaagatgggagaaacagcatgtttaaatgctgaagggaaagatcacctctgattacaaaactctattacagaaataacattttggggccgggtgcagtgaatcacgcctgtaatcccaacactttaggaggccgaggcgggcggattacttgaggccaggattttgagaccagcttggccgacatggcaaagccccatctctaccagagatagaaaaattaatcccagctgggcacggtggctcacacctataatcccagcactttgggaggcccaggcgggtggatcactggaggtcaggagtttgagaccagcctggccaacatggcgaaaccttgtctctactaaatatacaaaaattaggtgggtgtggtagcaaatgcctgtaatcccagctactccggaggctgagacaggagaatctcttgaaattgggaggcagaggttgcagtgaactgagtcactgcactccagcctgggcaacaaagcgagactctgtctcaaaaaaaaaaaaaaaaaaaaaagaaagaaagaaaaaatatattttggaattaattataggttagttcattaagcttttaaaaactggttggcatggtggctcatacctatactcccaacactttgggaagctgaggcaggcggataggttgagctcaggagttcagcctgagaaacatggcaaaaccccatctctacaagaaatacaaaaagttagccaggtagcatggtgtacctgtagtctcagctacttggaaagctgaggcaggaggatagcttgagcccaggaggctggggctgcagtggagtggaacatttggggcctgggccacagagtgagaccctgtctccacaacaacaaaattatatatagaagaaaaagtatggccaggtgcagtggcttatacctgtaatcccagtactttgaaaagctgaggtgggtggatcacttcaagccaggagttcgagatcagtctaaccagcatggtgaaaccctactaaaaatacaaaaaattagctggctatggtggcaggctcctgtaatcccagctactcaggaagctgaagcaggagaatcatttgaacccaggaggtggaggttgcagtgagctgagagtcgagatcaggccactgtactctagactgggtgacagagcgagactgtctcaaaaagaaaagaaaagaagaaaagaaaagaaaaactatgacaaaactatgtcaaagaaaaactatgacaaatcttaaactctgcctcatttcagagcacatcaactgaaaaaaaaaaagatggatggcctgacaaggaaaagaaaaaagatggatggctgggcaaggtggctcatggctgtaatcccagcactttgggaggctgaggtggaaagatcacttgagcctcggagttttagaccagcctaggcaacatagtacgacctcatctctacaaaaaaaaaaaaaaaaaaaaaaaaattagccgggtgtggtggtgcatgccaatagtcccagctactcaggagactgagaaggaaggatcgcttgagccagggaggtcaaggctccagtgagctgtgaccacaccactacactctggcctgggcaacagcaagactgtctcaaaaagaaaaaaagaaaaaggatacctttttaaaaagtagtaatagaaaatagtaaaggaaaagcgtctaattttctcttggttatattacaaagatcattccgtaattaaaacacaaacccaaagtactaaaccacaaaagcccaggtactttcagaactaagaaaatctacaatacaactacatgaaaccatctggaatatccccttaaaacacttttagtcttcaaaactttctcaaatctggccaggcgtggtagctcacgcctgtaatcccagcactttgggaggccaaggcaggcagatcgcctgagatcaggagttcgagaccagcctgaccaatatggcgaaaccccatctctactaaaagtacaaaaattagccgggcatggtggcaggcgcctataatctcagctactcaggaggctgaggcaggagaatcgctttaacccgggaggcagagtttgcagtgagccaagattgcgccactgcactccagcctggatgacaagagcaagactcagtctcaaaaaaaaaaaaaagaattttctcaaatctaaagtattttttcgctttggtcttactgaagaagtatgttgtcttgagataagctttctataaacttgtgtacaagaaccacataagaaaatatttaaaaatttttatgttaaattcaggaaattctaaaatgtgaaaccactccaaattaaaacatgaccacttcaaagaaaaggggataatttcaaagttaagaccagaacagcttttgacacaaaccaccgcatgttgcagaaacagtaacctagtttcattttgagtatagtgtttgttgccctcaagggatctgcaactttcgagcaagactttttttcattaaatgccagataacagataaagggggggggggggggggaatcaatacattttcatgctacaacatatcttaactcttcagtttaaaagaagaaaagcacagtccatatgaacacacatgtgtatcatattgacaaacctcagttactggtgaccacacgaaaatttcaactcaaggctgaactatagaacatgtgacaatttaatgatctgcttgtgaggagaaaacccccctcagtatcacataaaagtcttagctatttgctcactggcacaacaactggtcagtaataacatgagctgggaaagctgatggaagatgttcaaatatacaaaggttttttccacatagaattttttttttttttttggcagactcttgctctgtcacccagtctggagtgcagtggcacaatctcagctcactgcaacctccgcctaccaggttcaagcgattctcctgcctcagcctcccaagtagctgggattacaggtgcatgccaccacacccggctaatttttgtatttttaatagagatgggatttcactatgttggccaggttggtcttgagctcctgacctcaagagatccacctgcctcagcctcccaaagtgctgggattacaggcgtgggccaccgcatccggcccacatgtaattcttaactatcttttcccaaaatactgttctctataatgtacaatgaatgactgcatatttcagtaaaacaaaagtcccaaacatctacatttctgaatgaacaacctgttcaagacactatctccctataaactccagagaagttacttttaggatataagataaatccattagtaaccttacacaccacagacatttacattctaactgcactggaatgtctaaaaaattagcctacgaacaccaaagtgacagagcccaagaggaagtgaacagactcctggcttgcagacaaatgagtaggtggtggaaacatttatgtggggagatgattttatacaatatctttcttaatctaaaggaaaccacagatcttcacaatgtatgtgctataaatagatgtcatcagtcgaaaaccttaataaacgttttgtttttgcttgcttgcctttaaaaaaaaataactttttttttttttttaaataacacaaatccaatgcgtggtcaagataaccaaaccaaggatgtgaccgagcaggctgcccagagccctgggtacacataactaagtttaattcacagctgggcacagtggctcatgcctgtaatcccaaaactttggcaggccaaagtgcgaggattgcttgaggcccagagttcaagaccagcctcggcaacatggtgaaacttaatctctacaaaaaacttaaaaattagctaggccggccaggcgcggtggctcaagcctgtaatcccagcactttgggaggccgaggcgggtggatcacaaggtcaggagatcgagaccatcctggctaacacagtgaaaccccgtctctactaaaaaatacaaaaaaaattagccgggtgtggtggcgggcgcctgtagtcccagctactcaggaggctaaggcaggagaatggcatgaacccgggaggcggagcttgcagtgagccgagatcgtgccactgcactccagcctgggggacagagcgagactccgtttcaaaaaaaaaaaataattagctaggtatggtggtgcatgcctatagtcctagctacttgagaaactgaggcaggaggatcactgaaccccaggagttcaaagttgcaatgagctgtgattgcaccactgcactctagcctgggcaacagagtgagaccctgtctcaaaaaacaagaaaaaaaaatttattccccttcactgatttatgttgaagaaaagattttaattaataatgttttttaatatatataatattcttcaaatatacttcccttaccaaaatcaaagaattttcacattagctcacatcaaagcaaaattttttttttttttttttttgagacagagtcttgctctgtcacccaggctggagtgcagtggtgcaatctcggctcactgcaacctctgcctcccgggttcaagcaattctcctgcctcagcctcccgaatagctgggactacaggcgcacgccaccatgcctggctgatgttttgtattttaacggagacggagtttcactgtgttgcccaggctggtcgcgaactcctgagctcaggcaatccgcctgcctcagcctcccaaagtgcttggattacaggcgtgagccaccacgctggcccatcaaagcaaattttctatcactacttttgctaacatcttcaaggaatgtggctaggacaaccaaagatagttttgatcacagaaacattgttcaagttagcattccctccttccccaactcccacctaatcccccctcaaaaaagcacatttatctaagaatcaaaaagttcttgccaagtaattattagtctcttttataaatgcaggaaactaaggcccactggctaaaagatgagtcagaggggccctaagagtaagaattagccaaatttataactgctatgcgctcttctcccttaagataaaatccattcagatgactggcgactttttggaaggggcagtgaggggtggtagtaaggaagttatctagatttttctttttttttttttttttgagacagagtgttgctctgtcacccaggctggagggcagtggcgcaatctcggctcactgtaacctcctcctcccgggttcaagcaattcccctgcctcagcctcccaagtagctgggattataggtatgttccactaggcccagctaatttttgtatttttagtagaaacggggtttcaccatgttggccagctagtcgagaaatcctgatctaaagtgatatgcccacctcggcctcccaaagtgctgggattacaggcgtaagccaccgcgcctggccgtgttatttcttcaataaacaaaacaactaatcctaaactttaaaaagaaatgaagtaggccgggcgtggtggctcacgcctgtaatcccagcactttgggaggctgaggtgggccgatcacgaggtcaggagatcgagaccatcctggctaacacggtgaatccctgtctctactaaaaatacaaaaaattagccgggcgtggtggtgggtgcctatagtcccagctactcaggaggctgaggcaggagaatggcgtgaacccagaaggcagagtttgcagtgagccgagatagtgccactgcagtccagcctgggcgaaagagcgagactccatctcaaaaaaaaaaaaaaagaaatgaagtaatcaaacccattcagattcaatgcctaagatcatttagatgcgaagtgttaacaaaaggatgttgaaaaaagcacaagcataagaaacacttaaaatcaacatcatcaagcctcaaaatatcagacttttattaaattcacaaaatatttattgagcacctgccatgtgccaagtgccgcagccacaactacaagtgtagtacaacagataggattcctggtctcaggaggcttacagtctcacaattagtttataaatagattgtgagcatttgtcctagtttactgggaaaagtcctagtttatcactgttttctcctagaataatgctaatgatgccccctcacaggtctccaagtctggacaagttacatggttactttatttataaaaaaacaaacaggatgggctcagtggctaatgcctgtaatcccagcactttgggaggctgcagtgggcagatcacctgaggtcaggacctcgagaccaacctggccaatgtggcaaaaccctgtctctactaaaaatacaaaaattagctaggcatggtggtgtgcacatgtaatcccagctacttgggagactgaggcagaagaatcacttgaacctgggaggcagaggttgcactgagctgagatcataccactgtactccagcctgggtgacaagagtgaaactccgtctcaaacaaacaaacaaactactattcctatagggccacatgtttgtaaaatgcatattaagattttaatctttagcttcaaacttattttagacattcttctcattttgatatatatatgttatataatgaaagcaaatatttgttttagtttaaaaagaggaaatcaactctgattttatcacatcaaaatgtatacaaagtaaataaaatgaattaaaaaaatcaaaatgtcaaagaccaagtcccttgtgggcaggtagctctttttaaaatactgctttagcattccagcttgtgcctatcttagtactgagaacatattatggtttctagatatttcccactaaaaggaaacagggcagggaatgtatgagtttggaatatcttgtcctaagggaaagaaaggaagctatcaaaaactatcaggaatgtgtcaaaaagaatgaggaaccagcctgataaatgcctatctggcaaagataggacaactgagtatcaaaggattaataagagtcatggattgaaacacaccaaatatgcttaaatccactggtcacctttagaggatgctaagacagccaactcattcttttgaaaacagataaatgaagggcaaaaatcattcctatcagatctgtaccctaaggaaactaaacagttgaggggaaattttatataagtattccagctaataactgaaaaacaaattatagaattaaacattattttgtggccaggagtggtggctcatgcctgtaatcccaacactttggaaggccacgatgtgtggattgcttgaactcaggagtttcagactagcctgggaaacatggtgaaacctggtctctactaaaaatacaaaaactagctgggcgtgatggcacgtgcctgtggtcccagctactctggaagctgaggtgggaggaccgctggagcctgggaggtagaggctgcagtgagccgtgatcatgccactgcactccagcctgggtgacagagcaagactctgtctttaaatatatataaaatttgcaacccctaatgaatggatgtaggcaaaaagatcatcaatgactcataacaatacccaaaaagaggcaaccagcttttatatctcctagaattatacaccactacctattaagtaatcttgccccatgcctgcaagaaaaattgaaccttggttttgtttttttttttttttttttttttgagacacagtcactctgtcactgaggctggaaatgcagtggcatgatcacagctcactagagcctcaacctcctaggctcaatcactcctgccacctcaccttcccaaatagctgggactagaggtgtgcaccaccacacccagctaagttttgtattttttgtagagatggggatctcactatgttgcccaggctgttctcaaactcctggcctcaaacaatccacccgccttggcctcccaaagtgctgggattacaggtgtgagccaccacaccctaccaaaccttaatcttatcaagcctatagatctaaacaccaatctacaggaaataaaagggactgaggaacatatcaaatgacaccatgtggatataattagcaaaattcagactatggaaaactatacaacaaataacttggattcctcaacaaaaaactgcaaggaggctgcgcatggtggcgtatgtctaaccccagcactttgggaggctgaggtgagagaatctcttgagatcaagagttcaagaccagcctgggcaacatagtgagacccctatctctacaaaaaaaatttagctggacacagtggtgtgtgtgtgcctcccagctacttgggaggctgaagcaagaggatcacttgagcccgggagattgaggttacagtgagccaagactgagcctcaggctgggtgacagagcaagaccttgcctcaaaaaagaaaagaaaagaaaagaaaagaaaagaaaagaaaagaaaagaaaagaaaagaaaagaaaaacccccgcaaggagaggaatggagaggcaaagggggaggggagagaaagaaaacaaacctacccaatcacttcttgggacgctaattcaaacaaactgaaaaaacaattatgagtcaattgggacatacacatactgactgaatacttaatgatgctcaggaagtttttataaataatatgatgtctggagttgctttaaaatgagaggggacaggtagggaagtgtagtgagtgtagcaatcctcctgccatggcctcccaaagttctgggattacagatatgcacactgcactcatcctagtgtgttttttcttatggaactgccaagttatccctatgcatttttgtttcctagaatgcttgaggattttttctttttttctaataagtggtatgcttctgaatgaaactgaatgaaaaagaaaacaaaacaaaaaaagaattaaaaaagtgatttgctaatggaaggaacacttaagagttccatttaagctgggagaaaaagtgattttttaaaaatccatatctacttcatattgccaattccgtcctcctctgccataaactaaactgtttcaaggaattactcaatttaatgcagtggccaggtgcagtggctcacgcctgtaatcccagtactttgggaaggattgaacacctgaggtcaggagttcaagaccaccctggccaatatggtgaaactttgtctctactaaaaatacaaaaatttgccaggccagctattcgggaggctgagacagcagaattgcttgaatccaggaggcagaggttgcagtgagtcgagatcacaccattgcactccaaccagggaaacagtgcaaaattccatctcaaaaaagaaaaaaaaacaacaaaacaaatgtaatgcagtgagtttggatgccatggtttgccatagcagggattctttgcattggtaagtgtagagtgaaagatacccaagtactaccttatctacaatggtattctgcctcaagatcagtagctttttctccttcaagaatcactaaatacttaaattttctcagagcaagacatgaaaccatcctgcagagaagactcttgactactactctcagttaacagttaatttcctagtaaacaaaagttggctattttccatacactaatggacttaggggcttataactatactgaaaagggtactattgcacaagaactatactcacagaagtgataaatcatgtttctgcatggaatacaagaagggtggggaaaattctgccctaccttaaaatggccttgggcagaactatctgtgaatgtcacaagataactcttaaagatactaatgtcaaagataacttacatatgtttaaacaaacacagagatccagctacattatatatagtatatatatgtgtacaatctatgttataaccaaagcgaatccatgaacagatattcaggcttcggaatagagttttaaagcttaggatgtttccaaatagaaaaaggatattagctgaaaaactaatgaaatctgaattaaatacgaagtgtagttaatagtaatataccaatgtcagttccttagttttgagaaacacactatggttatgactttaacaaaagaaaccatgaggagtttatgagtacagagttgcactctacttgtaacttttctgtaaatttaagattattccaaaaataaaaaaaaaaaagtgtaagctgggcaggtggctcatgcctgtaatcccagcactttgggaggccaaggcgggcagatcacctgagatcaggagttcgagaccagcctggccaacatggcaaaatcctgtctctactaaaaatacaaaaattacccagacgtggtgatgcgtgcctgtaatcccagctactcgggaggctgaggcaggagaatcgcttgaacctgggaggcagaggtggcagtgagccgagatcgcgccactgcactccagctcaggtgacagagatgagagactccgcctcaaaaaaaaaaaaaaaaattgtgaaaagaacttattgcaatagcataaactatgttataatcacttcaattaacagattttctttgattcaaaaaggcaggctgctttatcaccttacttttctcaaaagtgagacttttaaaaaatggctgggtgcagtggctcacagctgtaatcccagcactttgggaggccaaggcaggcgaatcacctgaggtcaggagttcaagaccagcctggtcaacatggcaaaaccccatctctactaaaaatacaaaaattagccaggcatgttggcagatgcctataatcccagctactcaggaagctggggtaggagaattgcttgaacccgagaggcagaggttgcagtgagccaagatcacaccactacattccagtctgggtgacagagcaagactctgtctacatatatatatatatatatatatatatatatatatatatatatatacacacacacacacacacacacacacacacacacacacacatatttttatataaatatttatatatattttaaactttgatgttttaagacattatcaggattctcggtaaagactaccaattagcaagttgacttgggtttttcaccagaatccacatacaaacacgtgtaagtatgctttatggcacaaatcccaaactggctaataccaagaaaacctgactgacttctgacattaactggcatggctgattacagatcataacactatgggaattcagcactattttcctaaccgtgaaacgtgcatatttttggatgtagccattgaagaattcaccaccagaagatggtaagtataaaaaaagtgtatacaagaacattcattatagcattatttattataacataaataatggtacatacagacacaggcatactgtataaccatctgaattatgatgcagatttataataactgacatagaaatatgaccatataaaaaagattaaagaacatgtgaggatggtgtcatgcaatttcactactcaaaaccacggacatacatatatatatatgtgcgctcatattgagagatgtctcaggatagaagtaaaggtggaaaaggccatatttttttttcttcatatttttctagaatccttagttttaaaataagcatgtagtctgatgtagtgactcatgcctgtaatcccagcactttgggaggctgagatgggaggattgcttgagctcaggagttttgaggccagcctgggcaacatagtgagagcccacctatacaggaaaaagtacaaaaattagccaggtgccatggcacatgtctgtaagcccagctactcagggggctgaggcaggaggatcacttgagcccaggagttcaaggctgcagtgagttaggatcacaccactgtgatcacaccactccagcctgggtgacagcgcaggactgtctcaaaaacaaaaaaacaaacaaaaagttagccatcagccaaaagaccctaagttcacaggttgtcaatgttaactgcaatattagctatataattttagcttacagatataacatacaccatcacaatactgtttaactccaatggacaaactgtaatttaaaatatcaagttatttcatataaattccatttgtaaatatatatactactaatagtgtttgtactttagttgagaagatcagtcaatatattttttttttttcacaagcaaacaaatctctcgtcttcttgccaaggactaacctttccaaatcaatgaatttgggagctgaaagaacttataatatatccaaaataaacctattatatgagagatgaggaaacaagaggttcagaaaagttaaatggctcctctaagtcagcagctagctgatggcagagctgagcctagtacccagattcttctcataaggctcaaaatgaagtattcctacataaaaatattaacagtatcagctgctgacaaaaatgtggaacaagtagaatttttatgtctttccagtagggatgtagaaacaatttggtaatttcttataagttaaagatacatactatatgacctagcaatccccctcctaggtatttacccacaagaaatgaaacttatattcaccccaaaacctgccatgaacatttacagtggctctgttcataatcacccgaaactggaagccaaatgtccctcaaatggttacgaatgtacgtgatctgtggtatatccatacaaaggagtattacctggcaataaaaaggaacaaactgttgataaacccaaatacttagaaaaatctcagcagcattactatgactaaaagaagccagtctctaaaggttacatactatatgagtccatgtcacattctgcaaaagacgaaactacagtgacaacagatcgatagttgcccagggtgaggggagggtatgagtgcaatgggacagtgggagggagttatctggagtgatggaactgttccgtgtcctggctgtggtggtggtggtggtggttatacaaattgatattcacagaactgtatgaatatcaaaatgtcaattttactgtatattaatttaaaaaataaattatttactcagtctctggtttctaaaagccagaagtacctataaatttcaaattctttttttctggaggggcagggtctcaccctgtcaccaggctggcatggagtggcatgattctggctcactgcagcctccacgtcctaggctcaggtgatcctcccatctcagcctcctgagtagctgggactacaccacacctggctaattttttgattttttgtagagagaggtctgactatgttgcttgggatggtctcaaactcctacactcaagtgatccttccgcctcagcttcccgaagtgatggcattacaggtgtgagacactgtacccagacaaattctttaaaattttttttttttgagacagagtctcgctctgtcacccgggctagagtgatgtgatttcggcttactacaacctccacctcctgggaaaatacattttgttaagcactatatagggcagtgtttttttcaaagtgcccataccaacccaatttttctaaatgaaataaaacagaatgaaaattctaacagattgcctcacagtaagattaagtactgtctcaaagtttttgtttcagttgtgggtgtaggtatgaatgtgaatatgtgtgggcacgcatgcactgcttcttactgtggatcatagtcaaaaagtttgagaaatactgctagagggaattaaataaacaacagttctagatttagaacagtccagccctgcaagagttggcttctgtggacatgtattagtacacagtgcaccacctggtcttacaaacataaatcatctttaaagaaataaaaaatatcttaaaaaatctaactttccataagaggtgatgaaaggattgaggagagattggaaggcagaacaaactaccttttggatattaactataatacctgacaaattataatacatgcagaagtgtttatttctttaccataatctaacaagaagaaatcagccatatgaaattcaataatttctactatgcatatcatttccaaattttaatttaaacattttctcacttagcaatagtttcttattatattatataagctttaaatatatctcaaagaaccaaattatattctattagagcagggtaagacacacattaagatcacaaaaataaaaattataaaagagaaaaagaggggaaaaggtaaaaatgtatctacttttaagaaaattatactgctaagtctctgctgtgtaatatataaaaaggctttttctctttgtagaataacctttcagataaaagctattttccaagataatttggctttagccaccagcagactataaataacttatttttaaaaagattcacacctatagtcccagctactcgggaggccaaggcaggagaatcacttgaacctggtaggcagaggctgcagtgagccgagatcacgccactgcacctcagcctgggcatggaagcaagactccgcctcaaaaaaaaaaaacaaaaaaacaaaaaaacaaaaaaaacctgtccactaaaacttattctaaaatcttcatatataaaacaccattactattctgaaagttacctagcttatttctttttctttttcttttttttgagatggagtctcaactgtcacccaggctggagtgcagtggtgcaatcttggctcactgcaacctccacctcccaggttcaagcgattctcatgcctcagcctccccagtagctggaattacaggcatgcaccaccacacccggctaatttttgtaattttagtagagatggggtttctccatgttggccaggctggtctcgaacttctgacttcaagtgatctgcccacctcagcctcccaaagtgctgggattacaggcatgagccactgcacccggccacatcggcagtattaaagagcatggctacatacaattacatacaatttcatcaaccaattgattgacaggtcttctaaattccaaaatattcaaaacaagatgaactattttaagtaagttattcatgttgctattttgtttagaacttcagggttctaaaaagtttaaatatatgttacttataaaagttacattagataaaaaacttttaataattaattcacgagggattgtgatttcaatattatgaaatgagacagtaaaagaaaaaaatttgtctgggcatggtggctcacgcctgtattcccagcactttgggaggccgagaggagagaatcacttgagcccagcaggagtttgagatcagcctaggcaacatagtgagggaaaaaatacaaaaagaagccaggcatggtggtgcgcacctgcagtcccagctactcaggaggctgaggtgagatgatctcttgagtctgggaggtgaaagctgcagtgagccaagatggcaccactgcactccagcctgggtgacagagtgagaccctgtctcaaataaaaaaaataagttaaaaaataaaaataattagtagtgaccgggcgcggtggctcacgcctgtaatcccagcactttgggaggccgaggcgggcagatcacgaggtcaggagttcaagaccagcctggccaatatggtgaaaccccgtctctactaaaaatacaaaaattatctgggcatggtggcgggcacctgtaatcccagctacttgggaggctaaggcaggagaattgcctgaacccgggaggcggaggttgcagtgagccgagattgcaccatttgtactgaagcctgggcaacatagcgagacaccaattaaaaaaaaaatagtatctaaaaaacaaatccttcaagtgttataatcattttaaagacattttccatcattttagcccctctttatttaaggataaaagtatacaggttttgctcttaggttgacttgggaattctcttaatattgtgaaaatccaagctaggtctttgagaatgtgctaaaaaagggtttgaaattattttcccccaccaaatacttcgttatttcatttaaaatgtgatattacagggccgggcgcagtggctcacacctgtaatctcagcactttgggaggccaaggcaggtggatcataaggacaggagttcaagaccagcctggctaacatggcgaaatcctgtctctactaaaaaatacaaaaattagccaggcacggtggcaggcgcctgtaatcccagctacttgggggaggctgaggcatgagaattgcttgaacccgggaggcggaggctgcaatgagccgagatcacaccactgcacttcagcctgggggacagaacaagactctgtctgcaaaaaaaaaaaaaaaaaaaaaatcaaaaccaaaaaaaaaacaaaaaaaacccctcctcacaaagaaaaagttcacttagcaaaacgtatgacagtaaatcaatcacctaaattttgtttgtttagtcattctcggctcacatagcattagggctattatacattctagccaaattaagttttttaaagtatactgcaaaatctaaggtgagtcaaagaccaccatatttcaatccctctttatcagcaatccaatactagtgactgagtccactgatgggcaagcctgtaggtggctcaataataaaagaaaataaggattagcagattctcctgaggtaaatcctactgtattactgatgtgtctaccttatctgaaaagtctctaggtaactcttgtgggctcacagacttatcacaacgctatcctgcaacaaattacagaataatttaattctatagtaacctaagaaatcctattttacaagctgtatgcatggaataaaactgtatacatggccctaattgcatttacttttcaaggtaatcaatcacttgaactatgttttaaaaaaaaaaaaaaaaagaggctgggcacagtggctcacgcctgtaatcccagcactttgggaggctgacgtgggcagatcacaagatcaggagttcaagaccagcctgaccaatatggtgaaaccccatctttactaaaaatacaaaaaaattagctgggcataatggtgcatgcctgtaatcccagctacttgggaggctgaggcaggagaattgcttgaacccaggagaaggaggttgcagtgagctgagatcatgccactgcactccagcctgggcaacagagcgagactctgtctcaaaaaaaaaaaaaagataatgtcatctttaccataaagctgcctttctggctaaaaaacaagagaaggaactacatatataatctacaggcctaaagcagagttcataaaatctgacaggtaaagacactctacttttctttccttcccttgccaaagtaaaaattcataaagcactcaaatctatagccccaatagcagtttataataaaaatctcagaagacaattgaaattgtattagataaaatgttcataagtatttttaaaaatcaaatataactactatataaacaaacagataactaaaataagcaactgatattgccactgattctacaaagcactttatggcttgcattaaccatgaaaatttatacaaggctttgcacgtgattcaactctggacacagaacccattgagatacgttaatgtcctaaaatacccctttcactacataagctctgaataggcttaaaacaagcacagcctatgggtagcactgtagaatttggagctagattttactgtccccaccaagttccgccagccatagagcaacaaatcaaagttccaataagcacattgcacctgcaagacttaggtatgctccaagtcaaatatttgcaattttttcatcccaaatctgcacaaatgaaaaaatgcagatcgcagtgccagacttctaaatcttgtcataagacaaaatgatctgtagttttactccaacatgctccatatcctaacatgtattgagtctctaatatgatcatatgccaggaactgctaggagtttacatacattatctctaatcctcataacaaattccattctgctgctgaggaaactgaggccagagagctcaaagtgacttgttcaatatcataagaccagtaaacagtggagcgggggttttaaatcgagttatgcctacctccaaagcatcatctatctccatgagccttcttcagctaaagtcactaaacgcagcaccagttcacctctatcgaagtaaattcaagtgctgattgtcagaaatgatgacaacacctgagaaaaatatcacacctaaaatggtagcacaagacctaagacttcacaacaaggaggtgtagttatgccctttagaataacaagttttaaaggctatggttcaaaatacaagacaatccacttttttttgttgttgtctctcagctgacttttttataacaagggaaatgaaattcaagagtatagtcacatttttttggtaaaattatctaaaacccctgagaaaagggtgacttcaaaagttcacattctagtttacctcttcgttaggcttcagacattcaaaaacaaaatcacatcagtagcattactaatcaactttttttttctacagacttgaaaagtattttcttaccacactacgagattacttcccatacttagaacagaaatggcaacagttctgggtgtcacgaatcagatcttgagaccacagctgcagaaagtaggtgctgtttcccttgagtaggagctgctgatctgaaacctcctaagggaagggtgtctgaagaagagtgttggagaaactaaagcaagctgtttgtattaatgagagtgaactgctggcaccactactccttaagtgtttcactgctatgcaattgttttccagcttccaagttctgaatctggcagggagagaatgctgttctcacaaccgtatatgttatatgatcagctgctctatgatgtgtgggtgtttaactaggtaagtgactggtttagaagaggttctgcaatactaaatcaaggaagcacactgtcctctgagattttaatggtctgtcagtatactacaaagtatatacaaagaaaagtaacctacttgcaactttgaaatggtttgggtttagaatagccaaatgatttccgacagtaaaacttcaggcatgacatgagcaaaaaatataatgtgtaatataaagcactggcagcatgtttatgagataataaaaaaggcaatatttgcaacttcagcatgctttcaaacttatagggtatgctgcataattagtagaataaatgctattcttcaggtgtatggaacaggttctataggcaagattccaaggctcccttgccttccaaagtgccagttaatatcataaattccttagcttctcagaaccccccagatgcaaagaataggaaggtctcaaagaattttttaagtgaaaaataatggcagaatcgtaagctcctaaagagccggtactgtgcttaaaattactacccattccaacactatcacaagctggaataaatatctcctgattgcaatacgaccgaaaggcaaaagctgggtgcagagtaatttaaacaaaaatagctgatatttatcacctgcttattgatagaatggtgcaaagttcatcctcagttccagattctatatatggaggctgaattccctaaccacaattaaaatccttccattaaaacaaaatttcaaaatgaatgattttgatggcaccatccccattaagacatgaaatcacagttaacaaagttgaaaaaaaaatcctttttatggagcaggtacaccgctatgagaatgatatagccttcttttaagagatcagatcaacttcagccaacgcataaagattcaggataggcattataaaacagaccttggactttgctgttgaaatttgctacatttagaatctggtgccaggaacatacattaccaattggtcaagtctaaacaaattattttgactctagttttaactttttctgaaagactctcacatacatttcctttttacaggaaaacgaggaaatgataatttacaaatacctaacttatcctaatcaaagaacaaaacacaaggttacatgcataagctactttgttgtttattgctcagggccagacaatgtactctaatcctttttaaaaaaaaactaaccaactaaacaaaacacacaacgcaagttcctttcacttttgcataacagagatcttaacctgaagtcccaggaccagcttcaagttgactttagtggcatacaaaattatgtgtctatttaatggagaagacggttctaaagacttccatgaacccaaacaaagattactaaccactgaagtcagttccaggatcactaaaacttagtgaacagtttaaacaaaattatactaaaggtattacctatctgaatactgtgcacggtcctgatataaacaaccaagctgcctgccaccactgacaatcacagtgtcaagccccactcacaaaacagccccactcgacgacatcacctgtattcagctcagacaccacacatcccagcaacagcagctcctcaatccctaagcacacacatgttgtcaacaaagcatgtgctagttgccattcccagaacaatacgggcctggccatcctctggaaaaaaaaaatacacattctttcctgaatactaccctacgaatacattatgccttgatcatagatcccaaacactacaacaaaataggagaaacttgcacacaccatatctaatcaactgggaaaaaagcatcactcaggtgttcctgagggtccacgggagatgcatgtaagggatacactatgataatgatgcttgaacacgggaacaatctgggggcaaaggcagactcacgcaggaacaccccgaaaacgtggatgtggaaagcacccttctccaaaggcacaagcacattcctttgattggcaaaagccatttctgacaatggatccgcggtgacaggggctgctcggcaatcaggaagtgagtgagtgtatgagtgtgtctgtgttgtgggggagggatgctctagttgtgatcaaagctggaccttttcagagaaggtctcgaatcctgaagacagacttcgaggtgaggcaggggcatttatcatttctattggagacatccctcgacaatgaacatgttacgtggagatgtaacgggggtgtcactacctttggtgtctcggatctaagaatcttcagcagagcctgattggaggggaggaggaggtgggggtggagaaaggtctgcattacccactggggtgagtgtggggctgccggtggcgggtgtacatcagacgcattttatctactggcggcacaatactcccgggggttggaggtttgggtgcaaccgcaaggcgggggaggtagtgggtgcaagccaccagctgcagggcaggagaacgctcgcaggaggaccggtgcaaacctcctctcggcccgctaacccgtgccgccccagcctcccctcaggcctcagggcgagcggacccgctgcaaaactgcagccaagcccgggtccaggaggaagggggcgaaagagcaggagcggggcgcccccagcccaagctgggtgcctgaggagctcagcgcccggggcctcccagccggatgggggctgctccggcctagcgcacgcagctgcctcggcgaagggttacgccggcccccggagcccgggccggccccgcgggcggcggagaggaagggctgccgggggcgccgccgcggcggtggcgagtgcgtgggggaaggggcccttactcacccgggccggccgcctccgcctccgccgccccggccgccgcctcggcggtccatccctgcggcgggggcctgcagccgcggcgctcgagtcacaaccgccggctgggccagcccctccccccctgcccaacgtctgtcctcagggccgctcctcagacccggcctcggccgctgccgctgccgccgcagcgctacgtggccgccgctccgacgtctcgcgactcccttcccagcgcgcgagggcgagcggggccggcggggcgggcagcgcggggcgggcggcaggggagggggtgtgcgtgtgtggatgtgtgtgccggagggggcagggagggaggcgagcggcggcgaggacgcgcgcgcccgcgcgcgcccgcggccccttccctcgctggcccccccgcccaacggggatcccgacacctccctccgcccgccccctcagcatcccggccgctgggagcggcggcgcgcatgcgcagccctcgggccggcccgggcgcaccttttctgtctcctgccacattgtgagcgctccgccgcccagataaccgccggctccccgcgccgcccccgccttctcccactccgcccactgccgggagcccaggtaaagacgagagctgcgcatgcgcggcgctctccgtgagtcggggggcgtggttgccgaaaggaagccaaagtgaagagtgcagggggttgtagcaggcgctgctgtgggattccacaaaataggcgcgggttaggatggggaaggtaaagtgaagaaacgggccaaagcagaaaagtgggtcgacgtgagatttggaagtaaaaagagactttgaataaaaacttaacgactgctgacctccttgttctccttggagggcagtgggagtgacggggggcagaaatcagctcggcagcatgcaagcagtagtggtcattcgccgtatgaatgggaccgctaaaaactgaacagtttcgagattgccagggtgctcagaaaaacagatttagagcctcgcctgtcctgtggccaggaatagggaaggggatgtgtgtgtttgagacctacagcagctgcggtaaaggaagcctccattgtattacagtattatgactaattagctattaatcattaatatactcagtggtactattagttaacaaggtagcatttatccgagttcagagacaagagagtgtccataattgaaagtgtttagggtacagggagaggaaatgaacccggcaaggtgaaggcctgggatggaaaagacccaagacagcaaatccgaggtcagggttccctttcccaacataaaccaaacttccctgaagttgtccaaatcctaccttaattggaactccttccattattaaaagcacacttaactaatgttcttgcactaaggctgaccccaatagcacataaacattttctttttctttttttttttttcttatttgagacatggtctcactctgtcactcaggctggagcgcagtagcatgatcacggctcactgccgcctcctcctaccacgctcacataagcctcccacctcagcctgtggagtagctgggactacaggagtgtgctgcctcacctggataatttttaaatttttgtagagacaaggtctccctatgttccccaggttggtctcaaactcttgggctcaagcagtcctcccacctcagcctcccaaagtaatgggattacaggtatgagccactgtacctggctgacattttcaatacacatgcagctacttttccctaaaatagcactgctatggtttgaatgtgtcccccaaagttcacatgttggaaacttaataatcccaatgcaaaagtgttggaaactggggcctaataagagtttattaggtcatgagggctctgccttcatgaatggattcatatcataaacagtgcgttagttatctccaggccgggcgcagtggctcatgcctgtaatcccagcagtttgggaggccaaggcaggcagatcacttgaggccaggagtttgagaccagcctggccaacatggtgaaacccgtctctactaaaaatacaaaaaaattagctgggcgtggtggcatgcacctattattctagctactcaggaggctgaggcatgagaaccacttgaacctgggaggcggaggttgcagtgagctgagatcgcgccattgcactccagcttgggtgacagagtgaggctctgtctcaaaaaataataataataaattaattaattaattaaaaaataaacagtgggttagttatctcaaaagtgggcttgttataaaatcaagtttggacccctttgctctgttgctctctcatgtactctcttgccctcctgccttctgctaggggatgatgcagcaagaagacccacaccagatgagggcgccttgatattggatttcccagcctccagaactgtaagaaataaatttctattctttttaaattacccagtctgtggtattctgttacagcaacacaaaatagactccaacaagcaccccactcccgtgacccaaaatcctgcagggagtaagatgacctgagtctgggacaaggttagggaaaagattgaaactttctaagcaaaggggtccaagagctgactctgtccttgtccccttccaaaaacagatgcttgacttttattacatctggtctctggactctagggataattttggcaactttgggtcatgtttttcaataatgagtttttttcagtgaataaacactaaaaacaataccatatttcagcaggtagagagaaaatcttcaggtagaacaggaggaaataagcagaagtaataaaaggagagacagattcaatgtgagaaagaccatggtatccataggagctggtgagcctgggacatctcagtgaggtcaatgtctcgctttgcctttttagacatttgatccgttccccaccctctgctagtcagagctatccagcttagaagaggggtgtgcagaatgatggctaatgaatgaggtgactttcccagtgtctgtgactctccacccacaggccaactctctgaaggattcctagtaactaagtatggtttttgcagggaggttatgtcccttatctctttttctttctttcttttttttttttttttttttttttgagacgaagtcttgctcttgtcgtccaggctggagtgcagtagcgttatctcggctcactgaaacctccacctcctgggttcaagcgattctcctgcctcagcctcctgagtagctgggattatagatgcgcaccaccacacccggctaatttttgtatttttagtagagacggggttttgccatgttggccaggctggtctcaaactcctgacctcaggcaatccgcccgcatcagcctcccaaagtgctagggttacaggcgtgagccatcgcatccggacttatgtccattatctcatcagatcttccaacaaccctgcaaggcagacaggatagatattattcccaatgaaggaaattcaggccaaggaatgtttaatggctcaggcaaagtcacccagctcagtaaacaacggagccaaagcaggccccaggctccctgactcccagcctgctggtctttcagaggctttgacaggcctgctctgagaatccgccatttattgccatgtagtgaaaacaggtgcccttagcatgtgatggagaataattctaacattcagttctacttctctatctcctttatttaatgtttttttccttcttctttctttctttctctccccagaagcctgggacttgcctctgtgatctggtgctttggagggccttgggcctcagggctagcaaggtccctttctggagattccagttcctctgcccgccctcctttacctctttctcctcacacatctgtctgagggatggggatgagggctgccaaccaatgttaccacttgacagaccacaagagggctggttccagtgcctcccttgttcagctgctgacactgcagcttggcagtcattgaaggcaatatttagctcctacatctgacctgattggaagatcaggcttctgtcgtcctggtttcctggccttggatagttcttcactaacttttattcattaaggcagtgggcagaaagcagcagaaccctgttttttctttttttggggtttttgttgttgttgttgttgttgttttgtttttttttgaaacagggtctccctctgtcacccatgctggagtgcagaggttctgtcataactcactatagcctcgacctcctgggctcaagcaatcttcccacctcagcctcctgagtagctagggaccacaggtgcatgccactatgcctaactaatttttgtatttttttgtagagatggggttttgccatgttgcccatgctggttttgaactctagaactcaagcaatcagctggcctcagcctcccaaagtactgagattacaggtgtgagccactgtgcctggccagaacctgttttttgtttgtttgtttttgttttgtttgtttgaggcggagttttgctcttgttgcccaggctggaatgcaatggcgcgatctcggctcaccgcaacctctgcctcctggattcaaacaattctcctgcctcagcctcccaaccagctgggattacaggcatgcgccaccacgcccagctaattttgtatttttagtagagatgggatttcaccatgtaggtcaggctggtctcgaactcccaacctcaggtgatctgcccgcctcggcctccccaagtgctgggattacagacgtgagccaccgcgcccagcccagaacctgttttttaatttaaaattcttatttaaaagttctgtacattttgagaattcttaaaaccttcacacatttaatttaaatagcagcagagatatctggttcctggtaatgtgaacaggatggcttgatacaagctccctgctcactgcatttcctcacttcctaaattcctagggatgtacctccagtgaataatagtttttaccacctgtacatatacagggtcagcggccatggctccttgctcacccattaactaagatcacatcctacatacagtaccagacttagagccagagccctggtcatggcctcctaggttctcacacttgacttttactcaatcatttcaccatttaggctttataaaaaggggagactggccgggcgcggcggctcatgcctgtaatcccagcactttgagaggctgagggaggtggatgacctgaggtcaggagtttgagaccacccaacatggtgaaaccctgtctctactaaaaatacaaaaattagccaggtatagtggcacatgcctgtagtcccagctactctgaggcagctgaggcaggagaatcgcttgaacctgggaggcggaggttgcagtgagccgagatcatgccactgtactccagcctgggtgacacagtgaaactccatctcaaataaataaataaataaaatgggggaattatatgactgttagggtcctccagatctgatacccaggactgtaatctaaagacttgattatgttcattaatacatggcaatttcattcctttcctaagaattactatccaaagatcatccctaagcccttcctacaagaaactgccccttttacagaatgaataaagttgtcctagattcccgttttttcctcactttttctcatatctctaagtgacagtatccggagacagctcagaaagctggatttttagcttttcgtcatagggcttgtatatgtacatgcatgcatgcacaaatgtatgtatatgttcattcttaaagggatatgggccatgggcaccttcactctgtggccccccacctcccaccagccctacttgaattttagtaaatagtaattaaatgccaggaccaggcacagtggctcacacctgtaaccccagcatttttggaggctgaggtgggtggatcacctgaggtcaggagttcgagaccagcctggccaacatggtgaaaccctatctctactaaaaatacaaaaattagccgggtttggtggcacacaactgtaatcccagctacttgggtggctgaggcaggagaatcacttgaacctgagagacggatgttgcagtgagccaagatcgcacaactgcactccagcctaggcgacagagcaagactccatctcgaaagaaagagggaaggaaggaagggaggaaggaaggaaggaaggaaggaaggaaggaaggaaggaaaaagaagagaaaaggaactccatctctactaaaaatacaaaaaaattagccaggcatggtggcgggcacctgtaatctcagctacttcaggagtctgagacaggagaattgcttgaacctgggaggcccttgcagtgagctgagattgtgccactgcactcagcctgggcaacaagagtgaaactccgcctcaatgataaataaataaataaataaataaataaataaataaataaataaatgccaggatgcctagaagaacaaaagagtatgtactaagaggccagatatatgagtgcagctgtagtgataaggaggccattgggatagccaatgtcacataggtctaaagtttggttttagctagagctttcttctaccctaatactgcccccatgtcctgacagcgggtattgcagcaaatcctggactgcagccagaagctctggtctctacatcagcttctccatttgaaacatctcagaatttgaattttgactactctggtgttaacatcaaaatgcatttcatgggccgggcctggtggctcacgcctgtaatgcagcactttgggaggccaaggcaggcggatcacgaagtcaggggatcgagaccatcctggccaacatggtgaaaccctgtctctattaaaaatacaaaaaattagccggcgtggtggcaggcacctgtagtcccagctattcaggaggcctcagcaggagaattgcttgaagccaggaggtagaggttgcagtgagctgagatcgtgccactgcactccatcctgggcgacagagcgagtttccatctcaaaaaaccaaaatcaaacaaacaaaaaaacccacaaaaaaccaaaatgcattttatagtgttaaagaaaacatatttatgtggcaatttctacacatttttcttctgcattacttcatttaatccttctctcaatcctgagagcaaaggacagaaaatgttgttcccactgttttccactgtttggttttggtttgtttcctttctttttttttctttgagacaggctcttgctctgtcactcaagctggaatgcagtggcatgatcatagctcactgtagccttgacttcttgggctcaagtgatcccacctcagcctcccaagtagctgggactacaggcacacaccaccacatctggctaattcttttttatttttagtatagacgaggtctcactatgtgaccaggctggtctccaactcctgagctgaagctatcctcctgcctcagcctcccaaagtgctgggagatctggcccttgttttttgtttttgtttttgttttttatgagatgggtggctgttgcccagactggagtcccgtgacacgatcacagctcactgcagcctcgacctccccaggctcaggtgatcctctcacttcagttttttttgtattttagtagagacagagttttgccatgttgcccaggctgttctcgaattcctgagctcaagggatctgtctgcctcagcctcccaaagtgctaggattacaggcaggagtgagccactgtgcctggccccttgctgtttttttgttttgttttgtttttgtttgtttgttttacagcaaataaaaatgcagtctggattttaagggccacacagcagcaagaactaaaacctgggtctccaaggtccaagtccaggacttctctatgacaccctactgcagccctttgctggataccatacaaagcaaattgagcagatgtgttctctgccctctgaaagtttggactcaaatggacagccacaattctggcaaacataaaaggacaaagtgatttagtgtcaactcacatacgcaataaataactgagttaaatagataaggaaaggcatgttcacctggtctactgatattttttaaattccagttgagtagagagcaatgttaataagactaaggttttgggccagtcccatttttgcctacttgctttgcacctggaaaaatatttgtaactgcatgcaaactctttcccctcctcgtcttcaacaatctgtaaactttccctgagcagctaccaagtgtaacacaaagtgggaatgaaggaccattaagaaatcatctctgtgccatgcgcggtggctcaagcctataatcccagcactttgggaggccgaggcgggtggatcacctgagctcgggagttcaaggccagcctggccaatatggtgaaaccctgtctctactaaaaatacaaaaaaaaaaaaaaaaaaaaaatagctggatatgatggcatgtacctgtagtcccagctactcaggaggctgaggcagaagaatcgcttgaacccaggaggcagaggttgcagtgagctgagattgctccattgcactccagcctgagaaacaaaagcaaaactctatccccaccccccccaaaaaaaaggaaggaaaagagaagaaaaaaagtcatctgtgccctcgagcaacatctttaaccattcgcctaattcaaaccactgggatgaaaatgtatatcctgtatataccatctctactgctgggaaaaaagacacgtcaactcaatacccatcctatttttagacggcctgagattcgtccttatccatgcagggcagtcgggtaggacaatgaagaggtggacttctgaatttgagagaaattggtcttatcccagagaagtgaggccaccacccacctgcaatagcttggcttcctggatccctaagcaaaggtagaaaggaaccctggggttaggtagtgtgggcaaagacctgcagccggagaattccctatcctcctatctcagagcagactgttgcagccctcaattcatcctttgggggttctgcctcaggctcttgtctccagtagaatgatctaaggatctaagggagcgaggcccaaattgtgtttgagtctttaaagagactcacaaatctttttaagcagcaagcttaattgttgtctgtaattgatgtgacatatgccccagaggcatgcactgaggtccaattgagatggttttttaaaaaaattggaattaattaattaaagaaggcagctgcacgggcctggtagttggtgccaagctctgtaaccctaaaccagccaaccaacccaactggcctcaccacctgaggaacaatccctgcagctctcatggagatgagatgggatggaagtgctgggaagcagtgcagggaagaggggcttgcaagggggaacggtggggctcaagggacccactcttcactttcatgatcccccaaaggcttagctcttgagaactgttcggggggactaggtaactgggaaaaaggggtgggaaattcaaatggaagtatgtgaggggcaggcgagattttgggggaggggaagccagggggctggaatgggagggggaggggttcgcaggtgtgagaacggtgtagcagctccggtagggaatggaaggatccgggggtggagaggcctatgggcggagctcagaggaggtggagcctgggtgtgggggcggtaacatggtgcctgaggcctcagcactcagaggaggtgttaattaaaccccttacctgaggtcgttaacaatgctgtggcagcttttcctaggagttgggttaataacagtaataataacaattaacgataatgagaccttatctggagaaagttgttcctagagattgtaggcattaagtcattaattcccctggcccctgagggccaccttttcctaaaaagtaaatgttggtgcaagcagacacaaacaatccttgtgcacctgaggactgaactggtgtcctgtggccagtctgctaggcttgctgcccttggctgactgggttagttcatttacacggggataatatccagagttcgattagggcatcgtaaactgttataattttttgcattatctaaagtctctgaaacgatgcttaaatgaagtgaggtcagaaatcaccaccataagatgccaacacaactttgatgttgaaaactcggccaggagcggtagctcatgcctataatctcagcactttgagaggccaaggcgggtggatcacttgaggccaggagttcgagaccagcctggccaaaatgatgaaacccccatctctactaaaaatacaaaaattagccagatgtggtggttcacacccgtagtcccagctacttagtaggctgaggcatgagaatcacttgaacctggaaggcagaggttgcagtgagccaagatcgcgtcactgcactctatcctgggtgacagagcaagactctgtcaaaaaaaaaaaaaaaaaaaaaaaaaaggaagaaaaagaaaaagaaaagaaaggaaggaaacaaactcaagccccacctaagagcaccagcctgaacaacatgctccagtggaggacggcctggaaatgccccaatactgcatggtgaggccccgattggctgagtctctgctagagatggggcaagacttcaggtatctgccccggcggaccaagaagggaaatttagagcaaaggcttgagggaagttaaaaaaggagttttcttagattgggggaatcacatgggatagcggttgctccaaaagccttgagcaaactttagtgccaatagtggctggccttgcagagttaaacatagcagcgattactacaaattattatatatgctccaatccaaagacggactttgtattcacatctggtagatgggaaagtcatcatcattattccagtcaaatatcaaaggcagcaatatagagtgtgtattgtatagtacatttatttattttttattttattttagacagagtcttgctctgtcactcgggctggagtacagtgacacaatcacggttcactgcagcctggacctcccaggctcaagtgatccccctgctgcagcctcctgagtagctgggactacaggcctgtgccaccatgtccaggtaatttttaaattttcttttctctctctctctctctcttcttttttctttctgagacagagtcttgctctgtcacccaggctggagtacagtgttgtgatcttggctcactgcaacctccgtctcccggattcaagcaattcttctgactcagcctgccgagtagctgggactacaggcgtgcaccatggtgaccagctaattttcgtatttttttttagtagagtcggggtttcacatgttggccaggctggtcttgaactcctgacctcaagtgaatttttaaattttctgtaggaatggcagtctcactatgttccccaggctgtcttgaactcctgggctcaagcaattctcccacctcggcttcccaaattattgggattacaggcatgagccactgcacctgggcaacaccttgttttaaacaacaacaacaacaacaaaacctcaatgtacttaaacagaatgggtctcctggtggtccttaggtcatggggtggggtcatgatgctgtccattaatgaaagggcaggtgaaatctagagcaggagctaagcctatctgaatctcagagctgggcagcagaagaatctatgtcatgaaataagagggaccagtccccactcttctgaccttaggcccctcccctattcctttagaatcatagcctttcttctcttacctgtattactacaaagtcatctgtaagaaggtactggaactttcagggcttgaataacaatctgccttataggttgcattagagaacatacagtaaagtattatttggtgaagttagggaatggagtgttctcgttaatcaaataatctggttaacaaagtagcactcaacgtatagtaatatttgggatatacttatacaggttgagtatccctgacaaaataatctgaaatccaaagcacttctggttccaagcatttggataagggatactcaacctatactaaaattattcactgtttatctgaaattcaaatttaacaaggtgttctgtattttgtctggagaccttactgatacagcttagatgtcctctccaaatctcatgttcagatataatccccagtattggaagtggagcctgatgggaggtattggggtcatgggagcagatccctcatggcttcgtgctgttctcaccacagtgagtgtgttctctcaatccggttgtttcaaagttgtggcgccaccccccgcccccacccccacccccatcactcactgtcttgctcttacttttgccatgtgacatgcctgctcccacttcaccttctacaatgagtaaaagcttcctgaggcctccctagaagaggagcagatgctgttgccatgcttcttgtacagcctgcagaactgtgaaccaattaaactcttttctttatacgttatccagtctcaggtatttctttatagcaatgtaagaacagcctaatggctgggcacagtggcttatgcctgcaatcccagcactttgggaggctgaggcaaatggattgcttgagcccagaagttcaagaccagtctgggcaacatgacaagaccccgtctctacaaaaaaaaaaaaaaaaaaaaaaaaaaaaaaaaaattagccaggcctgctggcatgcacctgtagtccaagctacttgggaggctgaggtggaagggtcccttgaacctgggaggtggaggttgcagtgagccaatattgtgccattgcactccagcctggatgacagaacgagactctgtctcaaaaccaaaccaacccaaaaaaaaaaaaaaaaaaaaaaagaacagcctacagctgggcgcagggactcatgcctgtaatcccagcactttgggaggctgaggtgggtggatcacctgaggtcaggagttcaagaccagcctggccaacatggtgaaaccctctctactacaaatacaaaaaattagccaggcatggtggcacacacctgtaatcccagcttactcagaaggctgaggcccgagaattgcttgaacccggaaggcggagattgcagtgaaccgagatcatgccactgcactccagcttgggtaacagagagactctgtctcaaaaaataataataaaataataaaaaaaaaattaaaaaagaacagcctactacattttcttgcaggtccggtccactgctaggagatccatatctactctttgggagttctccagaggaaaaaatcaacaggcgggagaaagatactctgctagcttcagattcattagtactaggaaatggagagataggaggtataatgtattagggaagcaagggattcagaaccaggtgcccactgactctgagaagcactgggtgcacaggtaagatgctgcgaagtctttaactggcctccatgtcaaattaaacagttgtttcagagatctcaggaaagaaagcctaaaacaaaatatcatctactctttaatgttatccaacacccagacagaatcccaccataaagtgggaacagatgggcagcttctagacctcatttctctatgccagcagagaggaagcagggtctgggcacagtgctcatgcctgtaatcctagcactttgggaggctgaggcaggaagattgcttgagtccaggagtttgggaatagcctgggcaacatagcaagaccccatccctacaaaaaatacaaaaaaaaaaaaaaaatagccagcatggtagtacgcacctgtagtcccagctactctggagggtgaggtggagatcacctgagcctgggagatggaggctgtagtgagctgtgatcacaccactgcgctctagcatggatgacaaagtgagactccatcttttttttttttttttttttttttttgagacagttttgctcttgttgcctaggctggagtgcaatggtgcaacctcggctcactgcaacctcaaccacccaggttcaagcaattctcctgtctcagcctcccaagtagctgggattacaggcacccaccaccatgcccagctaaattttgtgtttttactagagacacggtttcaccatgttggtcagggtggtctcaaactcctgacctcaggtgattcacctgccccccaaactgctgggattaccggagtgagcagaacaatagcccccaaggatgtccatatcctaatctctggaacctgtgaatatgttactttacatgacaaaagggactttgcagatgtgattaagttaaagatcttgagatgcagaaattatcctggattatctgatggaccaatgtaaccacaagagtccttagaagagggaggcaggagcttcagagtgtgtcactgtggaagcagagattagagtgatgtgactgctggctttgaaggtgggagaaggacaggagtcaagaaatgcaagtagccctagatggaacacaaacctgccgacaggttgacttaagcccagagctgtaaggtaatggatttgggttgttttaagccactacatttgtggtagtttgttatagcagctgtaggaaataaatttggttccccattgtttacagggaagtctgaactgctttgcaaggcactcgagggccttttgctatctggcccttgcctagctgcctggctagcctggtctccccactcactcaccaggggtttgcatatggaacttctccagcatccttaataggccatgccctttcttcgatccatgcccttgtctgtgctgtttcttccacctggaacaccctctctttacttgtttatctggcaaactcctcatcctttacatctcagctcaaacaatacctcctctgtgaagcctttcctacttcccccaaagggacttaggcctccttttcctgtgcctccgctgtgttttacgtccactccatttaaagcagctcctgtactttaaggagctgttcatttcctcactggactgtaagctacgtgaggggataggacctcccatttgacctttggtctcccttagtacctggcatggtcctcagctcatcaaataaaggtccccagggacaagagttcttaccctgcctgccagcatgccctggactggagatgcagcccctccagctccacctctccatcagtaacatgcattaggtcagccatcccttctcttctctgttaagagacagggacaaaggaaatcagacatggaagtgcttcgggttcaaaaaagaaaaaggtgcttatcaaagttttgtagtattttctcaaaaaattttttttgagacagggtctccctctgttgcccaggctggagcacagctgcacaatttcagctcactgcaacctctgcctcccaggttcaagtgattctcgtgcctcagccacccgaaacaccacgcctggctaatttttgtatttttagtagagacggagtttcaccatgttggccaggctggtcttgaactcttgacctcaagtagtctgcccaccttggcctcccaaagtgctgggattataggtgtgagccaccgtgcctcgccaaagttttgtaatattccctttccttccctttcctccccctccctcccctcccttccctttccctcccttcccttccccttccctttttttcttggacttgccatgttgcccgggctggtctagaactcctggccttaagcgatcctcccatctcagcctcccaaagtgctaggactacaggcataagccaccatctctggcctgtaatatttcaattgtacccacggtctataatgtttcctctccaagtatcaatccctttgggaaatggatctagagacaagcttcatgaagacaggaactgtgtctactttgcaccccactgtatccccagcatctagcactgttctttgctctcaggtggattctctggtgttagttggtgaagatcttagaggaggctttctcgcattctttttgagacagggtcttgttgtgtcacccaggctggagtgcagtggtgcgatcatggctcactgcagccttgacccttgacctcctgggctcaagtgatcctcccacctcagcctcccaactagctgggaccacaggcacacaccaccatgcacagctatttgtttttttttttaattctttgtagagatggggtcccactatgttgccaaggctggttttgaactcctgagagctcaagtaatctgcccactttggcctcccgaagtgttgggattacaggcatgcaccaccgtgcccggatgtctcacagtctttagattcatagtttcacctctctaaggtgcttgctgatgttggatatcatcttgagtgaaggtttccccacagttactacattcaagtaattgagttccatggtattgagtaaagtgtgccttccaagcctccaaattccccgagggctctcccacgacatagccagacacaagattcctttccagtaggaattctctgatgttgtagaatatgattactccactcaaataaaggcttatgcacacttattacacttataaatgttttctccagtatgaattctctgatgtttaatgagaagcaaaatgcaagtgaaggtctcaataaaagcctgttacacacccagccctgtgctcagtgttctgagggactcccagatggaaggcctgggctctgccctccagatgtctacaaccttgttggggagacaagactcatgtactgcgttacacagccggagaacatgagacattatgtaatcatatcaagccacatcgtttagtggaattaaatgggaattgggagaaatgagagttcagccagagcttatctggatggggaaggggacataaaggactttagactttagctgaaaggatggtaagattgcgcctggaagagaaaaggggaagggtgttccaggttgtggactccagcaagaacaaagacatgcttctgcggggactcactgttttagactctgagggaaagcaagaaagcgagaggaaaagaagagagggatggaggaaataagaaagggagggagggagagaggaaaggatttgccctttcatttaggaaacttccacaaactttgtgcagcagcctttgaaaattttattctcagctgggccccatggctcacgcctgtaatcccagcactttgggaggccaagggggacagatcacgtgaggtcaggagttcgagaccaggctggccaacatggtgaaaccccatctctactaagtacaaaaaaattagctgggtttggtggcatgagcctgtagtcccagctacttgggaggctgaggcaggagaatcgcttgaacccgggaggcagagatttcagtgagctgagattgcaccactgcactccagcctgggtgacagagcaagattccgtctcaaaagaaaaagaaaaaagaaaattctctttctccaatgcctttctccctttagaaattgagtcactttcacttttcccaggcacacctaaaaaggaacgctttaccgctgtgctgcatatgtacatcctccctctgccccagccttcttgggatccattccagttccacgaccaggaatgttaccctcagcccaatgtgccttggtgacaaaggcaccaagtggggagaaaaccccattcaggagagggccctcggagagcacccaagcatgcccaaaccctacgtcttcttctttcacctatcgcatcctctaaaaattgtccataggggatgttgacagagtgagggtcatcaaatccaatggctttttacttatatcagttttgtaggagtttttatggagcattcagagtagagaatactttataacttttccttgttttctccattctgcagagggtagcagacaagcaagagggtggaatttgcagcatctcatcttggtgagacagttggaagacttttctgccaattatagtggttaaacactgactcaacatcaaacaacggcatgaggggtcagagccttcattcgtggacaagtttcaaaaacatgggagcaccacctgtcatgagcaatttagtcagaacagaagagaatagatcacacccaacaagacagaaaaagctgctttctggagagggcgggagctaatatttcctaacacggtgaaattgtgaagtgctttttgcagcccttcataatttcatcatccaaagggtttgcttttggaattcttagacacttaattctgtccctgctttccgtgtcacttccacgggacactgaatttgggaagagggagacctcaccaatgatgggaagaacagattgggggctggcgcccttttgggtttgccatgtgaacatcctcctggaacagtctccattctgtcccagcaagacacactctgctctgtgaagaacccaggtgggaaaaaaaaaaaaatctatgaggccacagtggaaatgcagctcagcaggactctcaggtaccccaaaattgtcccatctgacaactcaccacattctatttatttatttatttatttattttgagatggagtctcactgtgtcacccaggctggagtgtagtggcgtgatctaggctcaccgcagcctacgcctcccagattcaagcgattctcctgcctcagcctcccatgtagctgagactacaggcatgcgccaccacacccagctaatttttgtatttttagtagagatggggtttcgccatgttgcccaggctggtctcaaacttctgacctcaggtgatccacccccgcccctcagcctcccaaagttctgggattacagtcatgagacactgcacctggccaacacattctgttttcatcattagtgcctgtcctccctgctagctcatgggctcccccagagcaggcatgtttgccctagtcaccatcaaaactgtcttagtacctgtcacggtgcctggcacatagcagttattcagtaaatgtttgttgaataaatcaactataaacatcaaaatgattcccttaaaaaggtcttcattcttgttcagatgtagagagttacattacaaacacttgtgtgctggggataggaagggacactgttgggtaataataagtgcttgaaacatgtgggagggccctggaaaatagcccaaaaagttcacattgtatctgataagcaacagggagctactgcaggttcttcaggtcaccagtaggcaagcaggtggtggctttccaggctgaaaagtgtatttgatctggaagatagtaggatcacagacaaacagtgagtcttggagtagcctgatcacagtggcaagctcaagagacaattttatggctgagggctgaatgtttcagctgggtgggtgtcaagaaaccagcaagactccaggcatggtggctcatgcctgtaatcccaacacttagggaggccgagacagaggatcccttaagcccaggagtttgagaccagcctgggcagtataaggaagccctgtctctacaaaaataaaaacataacaaaattagccaagtgtggtggcgtgtgcctgtgcttctagctccttcagaggctgaagtggggaggatcactcgagcctgggaggttgaggcttcactgagctgtgatcatgctgctgcactccagcctgggcgacagagtgagaccctgtctcaaaaaacaaacaaacaaacaagaaacccagcaagaattaagaattctggtgagcactgttcccgtgtgacctcagagagctgataggcaatttgatggcagaggcgggggccagtgcagtcatggccaaaaatggccagggaggaagaagatgccctgggtctcagcccagagtctggtgttggatggtgtggagagtagaagtgaagccaaagtaaggtctgtctttcttcagagagagcctcctaaaggcagaggacatgtcttatccatctacacccacagctccaagcggagctccttgcccagagaagctgcttaataaattgacacacgaatgcttggctgcctcgctggctctgggaggcatggatgatgccagagcttggggaggccactgaagcagtgtttattgtcctttctcctccaacttcctcagtctacccttctgtgttgtcccacctctccttgaagccagaagatgtccccaaaggttgctactctccacatggacagcaggtactgaggaaggaaacagtctccacctgcggcttgcaactccctcctcctctgggaacccactgtctggcaggacccaggcattttgtagaatattccacttattcgcacccactcctcagagtgtcactcacattcccttctagtctctctccctttcatctcatctcagcaggcagggacatgccaccactggaagcctggcattagcaaatgtgcacacagcacacacatacacacctttccctgtctctgagccattgtctgaacctctgcccctgggcctggcccatctttacgagatccagagatccaggcttttcctatccaaggatgctgaatctggcccctgacgggagggagctgggcattttgcacgtctgcagtgttgccttccctcagggggctggggaggatccacccatatggcagaaccttccagagagacgcgaaaccaggagcctgacctcatggtgcccgcagcatctggcacagagggtaccagttctgctatcctggctgcagcccagttctctcttctagaatccacaccttctctggctcccctccaggccagcgagatttgccccaactgagggaggacagggatgacctagtgagtgggaggtgatggggaagagaaggaatctctgctacagaaacttggtgaaatcattccttgcctctgtgcctcagtttccccttgagaaattcttccagagttaggaaggagctcagccctgggagagaaacccatagtcatgctgtgttctcttgcagccaggagacgcctgccctgccccgccccttgctagttggtgatgctggcctagcaaggcagggtcctgcaggatgaaagctcggagaagccaaaacaggaataataatgataataatcagctgcggcgtctcaaccatccaggaatgcaaggctccacgccctgtgtgcctcacaccccaggacatcgcaagggctcctctccctttattttattgcagtgatcccacactgccattcccagcccaacccatctggattcccaagaactgcagtccagccaccggctcatccaccacccagtttccatgggaatattcagctccaagacctaagccagcagcagggtaagacgcccagctacttggaaactcgtgctccatggcttctgggagaagcagtctgcccacccctggcctggaacgctttcccatagacccatctatgtctggtcaatgtgagggccaggtaccttgcttgtgtcaatccaaatctggattcaagtctggtctggccttaaactaactcaccacgggaccctagacaggtttggtttcattttttaacttttttgggttcactcgctctcttgcccaaaagcttttcaaggatccccatggctcagtgaagataaactctggatctagaggtctagtacgtggccatttgaaatctcgttctaaaacacctttccaaatccactcgtctccttcacctttgggatgccagccagaaggaagtactcaccgttggtcatgcacatcccatgcttttccatttggggattttgctccttctttgggaatgtcattccttccacctctacctccacctggcaagaccctcctagccttcaaggcccaggccaggggccatctcctccatgattatgcctgaccctcatccaccttggaaccctgcttccttttcctcagaccctttcaagccccagtactcacattgtgctgtgggtgtgtgcatatcttaatcatcagcatcctgatgtctcgttcatctctgtgtctccatggcggctagtacagcaccttgcacacagggcaaggaatcaatacataagttccagacatacattgtggagaataatcatcctcactctattaaatcctcccacaattgtgctccaaaaaataaaaataattattttaggccaggtgtgatggctcacatctgtaatcccagcactttgggaggccaaggcaggaggatcgcttgagcccaggagtttcagaccagcttgggcaacatagtgggaccctatctctacaaaaaataaaattagccaggcatggttgcacatgcctgttgtcccagctactcaggaggctgaggtgggaggattgactgagctggggaggcaaaggttgcagtgagccaagatcataccactgcactccagcctgagtgacagagcaagaccctgtctccctagctccaaaatgtttatttaatataacatttcctgagtgtgtattattggcttgagagagaaataaagagtacaaaggccaggaaggccccttacccccaccccagcctcctctgtaggtaggatgcaggtacccaagtctccatgaagacatcagctctctggctttggctcctaggctgacactaggaaccctttccttgaccagtggctggtccagttccatctcagactctgtctagtacgaggtgggttcttcccttgttagagaatgataatctcaccctttgggggcttcatcttttctattttttattttattttattttttaattccctgcaagtgttgcacatgggtcatcttttctaagccccagcagcctccaggccccataggactcatatgccagaaggacccctggattcacatggtattaagaggttagaaccgctccactcctggatcctgattagaactcctcggagcaccatacaccattgctccctcttagtgttgttgaaaatagtaacaataacttcagcaacactttgtgtttacgtaaggcttttctctagggagctcagctaatctttccctcatctccagaaggaagagaggaccaaggtaatgaaggacaaatgagccattgcagccacactctggaatacaagcatcctttgttcttagaagtaagtgcaatacataggatttcagatgtggggaactgataagcaggaaaccagttcatttcccgagacccaaaacccatgacttaagaatttttgcccaaatcaaattctgtatgagatgaaaacccccaaactgaggtgttatatcacatagtcataacatttgagcatgtacccttaatatatgttcaattatgtatacattgtatacacaacctactctcattaggacctcaagatacaatatatatttgcggtgaggttcgtttttttagcaatggtagatgtgaagcccacatttcaaatagtcaccttgataactacaaattacgaaaaagaaggaataagttctagtgttggataatacaatagggcaactatagttaacaatcatttattgtattttttaaaatagctagaagagaatatttggaatgttcccaacacaaagaaatgatcagtgcttgaggtgatggctatcccagttacccagatttgatcattacacaccgtatgcttgtgttacagtatcacacataccccatacataggtacaactattctatacccataaaaattaaaaataaaaaaaacttttggccatcttcctgtgagccctgattagactgtcactgttttagcctcataacagggctggcagagttcctgtgaggagcagggccagcttttccgttttcttgtgtgcctgtgcttgctaaattagggtgatctttaatctgcagggtttttgctggaatctttttaaaccccttgttcattctgtaaaggttaatttagtttatgttagatcatacactccactgtgtaatttaaccaggcaatgtaagctgtgatcctttgccattttctggccatgatctggagcgagggagccctctcagcccctgcaatacacttcccacacctcctgcaggagaccccacatgctacactctgcctgtgactcagtgtccatccgtatatttgcatcatggtaaagcttgccctactcactgtgaagggcatctcctgctggacctccttctcgtggcggtactcatcatttctgtcctctcctgtgccctcctggcagtctcagccacctcaagcttacctttctaaaaccttctttgtaggccgggcatggtggctgtgcctgtaatcccagcactttgggagactgaggtgggtggatctcttgagcccaggagtttgagaccagcctgggcaacatggtgaaaccccgtctctactaaacatacaaaaattaggtgggtgtggtggtccacgcctgtagtcccagctactcagaaggttgaggtgggaggatcacctgagctcgcgaagttgaggccgaagtgagccgagattgcgccactgcattccagtctgagcgatgggagttgagatccccactcccctctctatattcctgatctccattaagaacatcactaaatgcccagttgccgatctccaccccttcctctttgtcatacttccagacaaatccactttctaagacccctccctcattgtctcttgtcctgaccgctgctgggaccacttaaccagtggacctccctgccactgctcccttcccctcttatttaccctccatgcttctgtcagataaatctctctttttttttttttgagatggagtctcactgtgtcaccaaggctggagtgcagtggcacactctcggctcactgcaacctccgcctcctgggttcaagtgattctcctgcctcagcctgccgagtagctgggattgcaggcacccaccaccacacccagctaatttctgtatttttagtagagacagggtttctccatgctggtcaggctggtctcgaactcctgacctcaagcgatccacccacctcagcttcccaaagtggtgggattacaggcatgagccatcatgcctggccgagaaatctttcaagtgcacaaatctgattggtttccccacttcctagtctttccatttgcctcctgccacaggataaagtgcaaactcttggcagagctttgcaagaccagtccctgctggccgctgcaaactggtcacccccagccacaccactcactttcaagccccagccaaccacccaggagctgccaccttgtacactgtattccctgtttcttagactatcttttcatgtcctttcttctcggcctccttaacgtccaagaccagcttgcctggcctcttccaaacactgacggcagacaaagttgccctgtgtctcggcaccctagcacttgtatgaaactctcttgtgttatgctcaaatgtggtcgcttagttgtttgtatcctccataagatatcagttcctgagcactcgggcctgtattctactgatctctacagcctcctgttcccagccccctcctggcttgctgtggtgtcagcctgtctgtgaaggactgttccactggtataaggtgttaggtacgacttttctatccactgctgcactgccctcaaccccaaccccaatagtgttagctattactagggcccagatactgttctagcagccgtgggcttatcagctcacttaccctcactacactgccatgaggtcacctattgttagccccgttttacagatgaggaaactgaaacacagcaaattacgtgttagtcccaggtcatgcagctaggtgacagactcaggagtcgaacacagccaccctagatccagagccctagtattagcctctgggcatacagacaacactgtgacgcctcactcagccttctcactgtccccgcttcctctgacaagagtggctgctgttcccaaggccaactaaactctctttccaccctgcccaatgctgagggtctggtggcttagctggccccttccccctcagagaaagtaacagatatgacaggctcccctcctgtcacgaatgccccaccatgcttggaggaggccctctgctcatccactcatctcctggcctgaaactctttgaggggatctgaatcctggtattagtgagtcgaaaccatttctctgggaggacctgcctgaactatgcccaggaaggcaaagcccatctcgaccccatgctatgcctaccaacccggcaggcacctggagggtgtccacacctacttcacctgatcagcttctggccactcagaacatctccttctctggggctttttctctattccgccttgcctccccacacttccttcctgttcttatttctctttacaagactgggtatttttaacctgaggtttccacttatctcttcttgtctgattgggactgggctgggcaggggtgccagtgtgctggaagggctaggagtattttgctagcctcagaggctacagtccgcatccgacactctaggcccagactttgccccgactctacccatctttgtggagctatggagctcccctcctctacttctggagtataaccttaaactggccttgggttgaagctttggaaactgtgcagggcatggaaggagctgaacttcccaccctcccctccacgcactccccatgcccactcctactcccaggatgctgccgctaggtgaagatgaagagcactttgaggccaggtgcagtggcttaccctgtaattccagcacttgggaggctgaggtagcaggatcgcttgagcacaggagttggagaacagcctgggcaacacagtgagacacctatctctacaaaaacaaaaacaaaaaaagctggcgtgattgagccactgcatttcagtctgggtgacagagaagaccttgtctcaaaacaaacaaacaaaaaacaccttgaatttcacacgtccctggaacagccaccaggatcatccctcagtccactttcatgatccacattataaacatggatgcctttctgagggattatgggccttcagagctgctctttcatctgcctcagccttgaggtgcagctcagagagctctgccctcacaccctggcccctcttgcacatccctgaaggtctctgcttcaatgtcctcctacctaagcccccagccaggcccacccatcactctccactccgtcctcacctgtgggtctccaaccctcatgtgtcccacgcttctctgcactccaggtgcttaatagagaaacttttatttgaagtccgtacagctgcaaagtggagataattgggggttttggttgtggtgtttgttttttagtttggtttctgtaccagctttcttaaaaaaagaaaatggtggccactgaacagggtgatttcagagattttttaaaaagcaactgacaagcccagtgcagtgactcatgcctgtaatcccagaactttgggaggctgaggtgggcggatcacttgaggtcaggagttcaagaccagcctggccaacatggtgaaaccctatctctactaaaactacaaaaattagctgggtgtggtggcgcgtacctgtaatcccagctactcaggaggctgaggcaggagaatcacttgagcttgggaggcagaggttgcagtgagccaagatcgtgccactgctctctagcctggcaacagagtgagactccatctcaaaaaaaaaaaaaaaaaagaaaaaaaaaagcaactgacagtgactcacttgctccaggccggcaggcctaagtttaatgttctgtaaagtaattgatagtcataatgactgcctgaggcacagtggtatcccgatgtgcgctttgagtctcactgcaaaagattaaatatgttccgcattgtgtttatgtttgactgtatttttaaaattctaattcctttaaaatgggcacccccggtataatgtacgtagtgactctttaattagggaactgattttccatgtggtctagtggctttcaggacttgttgactagacagaatatctgcagctctcatcgccagcctcacccagccacacctcagcttcacactctggtaactgtcctcaccactccctcctgttcagctgccccatggtcccaagaagcaatgctttccagccccattgtgagctgaggctgcagccctgtctggcaccgcttttataattggtcattcagtcttcaaacctctgtggagcatcccccatgaatagagagccatgctgggtggggactgggaagaagcagaagaaaatgtgtcagtgctgccttcagggagaaaacacacacaaacacctagacagttgcttcctacaagttcaaaagaacttgacctcggaaccgaagaaataaggtcagggtttatcagaaaaatattcccaaaggggagaatttgagcctaactttgattgtcaggaaggctatccgtgctgggtagataggtgcacggagatggggaggctatgctggcagtgaggccagaatccctcatcacctctaccaggaagtagccttctgaatcctggactgctcctccccctttgggctaactggctgataaggactggggaccaaccccagcaaggaggaagtggactggcttcctgtttatttatgaatctcagagcagcaccgtgcagccgtgaacaccaaccaagcacagcaatcccagcccaagccaagagccccagggagcccgtctgctgacccagcaagccctcacccagctgggagatgcaaggactccatcccagggcagcccatggtccggagggccagcctgggagcagccatgccagattgtcaggaacaggaggtagaggagtgacaacttccccaaagaggtcaaagccacacattcgtaatatgaagccactgggcagctccaggggcccaagcattggctttcccttcaccccaaaggttatttcctaagactctgggcacaactgtggggcctgtgggaaaatcgtgtgcagaaatagctgggccttttaagaaccaggcagttttgtttccaacagcaaaagctgactggtgacaacacatcccagagccacatgagggaaaacaatgtagccatttaaaagaatggggtggattagtctgtgctacagggcaagatgtccaagatacttccataaatgaaaacaaggtgcagaacagaacagtacgtacagtgtgatcttttgtgcaaataattacaatagcagaggataagtatgtacaggcttagagatatatgagctgctgaatgcatgactttttttttttctggaaggaaatttaaacaatctaactggttattttagaaatattttgagagaaaagtggtgggagggctttctcttttcattattcatctttctcacattgcatagtgaggtatatatatttaggaaatgttacctgtggacaatgaagttatggttcattctgttttattctttacatttcattttttgtttttttgttttttgtttttttgcgacagggtcttgctctgtcccccaggctagagtgcagtggcgtgatcctggcttactgcagcctcaacctgctgggctcaagcgatcctcccacctcagcctcccaagcagctggtactacaggcgtgtgccaccatgaccagctaatttttaatttttttgtagagatgaaggcctcactatgttgcccagactggtctgtatgtttttttgttttctgagacagagtcttactctactgcccaggctggaatgcagtggtgcaatttagactcactgcaacctccgtctcccaggttcaagcgattctcttgcctcagcctcctgagtagctgggattacaggcgcccgccactatgcccggctaatttttgtatttatttatttatttttttgagacagagtctcgctctgttgcccaggctggaatgcagtggcgcgatctcggctcaaggcaacttccacctccccagttcaagcgattctcttgcttcagcctcccgagtagctgggactacaggtgcgtgccaccatgcccagctaattttttgtatttttagtagagacggggtttcactgggttagccaggatggtctcgatctcttgaccttgtgatctgcccactttggcctcccaaagtgctgggattacaggcgtgagcgactgcaaccggccctgatttttgtatttttagtagagatggggtttcaccatgttggccaggctggtctcaaacccctgacctcaggtgatctacctgccttggcctccgaaagtgctgggattacaggtgtgagccactgtgcccagcctaggtttgtatcttttttgtgtgtgtcttgttttttgagatggtgtctcactctgtcacccaggctggagtgcagtggtgtgatcttggctcaccacaacctctgcctcatgggttcaagcgattctcgtgcctcagcctccagagtgactgggattacaagtgcccacccccatacccagctaatttttgtatttttagtagagacagggttttgccatcttggccaggctggtctcaaactcctgacctcaggtgatccgcccatctcagcctcccaaagtgctgggatttataaacgtgagccactgtacctggcaagatctgtatctttttctctttttcttttctttctttctttttcttttttttttttttttttttttaggagtggagagtttaataggcaagaaagaagggagaagaaagaaggaagacgctcccctgtacagagacagagggagggggctccaaagccgagagaggagacctcaaggtctgtatcatttatttatttatatatttgtttatttatttatttattaagacggcctcccaaagtgctgggattacaggtgtgagccaccgtgcccagccgtggtctgtatcttttttttttttttttagacagagtctcactcttctcgcccaggctggagtgcaatctcggctcactgcaacctccgcctcccgggttcaagagattctcctgccccagcctcccgagtaactgggattagaggtgcccgccaccacacctggctaattttttgtatttttagtagagacggggtttcaccatgttggtcaggctggtctcaaactcctgacctcaggtgatccacctgccttagcctcccaaagtgctgggattacaggcgtgagccaccgcacctggcccagtctgtatcttttaaaacaaaatgcattaaactgataagtattatttttaagacaatttaaagaatcaggcagtctgcatttgcaagatcagacaggtcagagctagggtcactaattctctgggaaaatcaatgggagatgatgggagaaatgctttgctttaagatctgtacacatcaataacagtgtccctgattctacacttctctttgaggtaggaggcaggactcagctcacgtctggaggtggagctcagacacggggcctaattgaggactagctaaaacagggacagggcgaaaacacctccccataagacatgcccactagcatgccatgtcagtttactgatgccatggcaacacctggaagttaccgccccttcccatggcaatgaccggataccccttttctagaaatgtctacagaatctgccccttattttgcatataattaagagtgggtataactatgactgcagccctgcctctgagctgctactctggacacactgcctatggagaagtcctgctctgcaaaaagtagtacctttgctgctgctggacactgccacttcaataaaagttgctgtctaacaccaccagctcacccttgaattctttcctgggcaaagccgagaacccttctgggctgagcctccaccaacttcatggagtcctgtggcaaacgtttgagccttctctggcttccttccaaccacttcctttccctgtttcttccccatttcatggcctcatcatttaatttttggcctgagccaaacaataaggaacagaaatctggaggaagaaaaagaagaaacaaaaactcaatgtacagcacttcaatacccatggcccaatgacctgttatttggactaagttatattaacctctttaagaaagacctgaatcgaattcacctttgaatcccctgaagcatgtagcctaggactgcacacagtaggtactcaataatacctgttggatgagtgaatggagcaactgtgtacacagcacttgtcctttttcaagtctgttctttgataaaagcacccacaagatagaaggtcaagcctccccaagtacttagcctaacagatttaacgttgcccctcctcatgagtgttttgggaaattggaaggaaactcctggggcctctgaaagagaatctgatgtcccctctgtggttctttttttttttttttgagacggagtctcgctgtgtcacccaggctggagtgcagtggcgcgatctcagctcactgcaacctctgcctcccaggttcaagcgattctcctgcctcagcctcccgagtagctgggattacaggcgtccgccaccatgcctggctaatttttgtatctttaggagagacagggtttcactatgttggtcaggctggtctcgaactccagacctcaagtgatccacccgcctcagcctcccaaagtgattataggcctgagcgaccgcgcctggccctgctctgtgccatattaattcattaacaactgggtaagctgcccaaactgaccttaggctaccaaaggctgtgtatgtagcgccctgagagccttcttggtttaagaaggagttaaaacagaactgggtggtgggtctcccacctggcagagagatgggtagcactagtttggctggtggctggtgcagaacagttggtatatttacagccacagatgcccaaggggttctgtatcaggaagtcgtctgcagagagtcacttcaacctgtttacttgtcttcagtactggcgctaacattctcctagtctttccccgggatatttttctgaacatcttgtgctggttgacacaggctggcacggctagtaacaggcaggttgctgccatctggtggagaagaggggccacggccttgcctggctcagtctgagactgaagagatgaaaagaatttttgaggaacgcttctaggagagtggatttcaaacttccacagccatggaacccttacttcttttaaagtttattttatgtatttatttttttagaggtagggtttcgccatgttggccaggctggtcttgaactcctgacctcaagtgatctacctgcctcggcctcccaaagtgctgggattacaggcatgaaccatagcacctggccatggaacccttctttcttcttcttcttcttctttttttttttttttttgagacgtctcgctctgtcggccagactggagtgcagtagtgagatcttggctcactgcaccctccgcctcccaggttcaagaaattctcctgtctcagcctcccgagtagctgggactacaggtacacgccaccatgcctggctaacttttgtatttttagtagacatggggtttcaccatattggtcaggctggtctctaactcctgatctcaggtgatccacccgcctcggcctcccaaagtgcttggattacaggtgtgagccaccacgcccagcagaacccttccttctaacaacagcagtgcctaaggcccttgtgtaaaactgataaatgcatcatggctctggctgaaagcatcttcacatcaatcacctcatatactcttcaataacactacaatgtgaatattcgtatctttagtttcttgaggaaaaaaataaggctgtttgaagtatttaagtaatttacccaaggtttcccaagctattcagtggcagagtcagaatacaaacccagattattattattattattattattattatttttgacacaggctttctctctgtcacccaggctggagtgcagtggtgcaatcacagctcactgcagcctcgacctcccaggcttaagcaatcctgccacctcagcctgagtagctgggaccccaggcatgtgccaccatgcctagctattttttaaattttttgtagagtcagggtctcgctatgtggcccaggctggtcttgaacttgtgggctcaagtgatccacctgcctcaccttcccaaactgctgatattacaggcatgagccaacaagcccggctttttgtttgtttgtttgttttgacaggatttaatactattgcctaggctagagtgcagtgttgctcactgcagatgcgaattcccgtgctcaagcaatcctcccaactcaatcttccaagtagctgaaactacaggtatgcatgaccacacctggctaattttttattttttgatttttttgtagagatgaggtcttgctgtgctgcccaggctggtctcaaactcttggcttcaaatgatcctcctgctttggcctcctaaagtgttgggattacaggcatgagccatcgcgcctggcccaaacccacatctttctagttctagaacctgcactagttccactaaactgagttgccttctggagtgagaaccctgggaagtccagcccagcacagtttcagtgtcagcaagcattgctgtagttcactggcatgaagatgaagggcttttttttttttttttgagacagagtttcgctcttgttgcccaagctagagtgcaatggcacgatctcggctcactgcaacctctgcctccctagttcaagcgattcttctgcctcagcctcctgactagctggtattacaggcatgcaccatcacacccggctaattttttgtatttttagtagaaacagggtttcaacatgttagccaggctggtcttgaacacctgacctcaggtgatttgcccgcctcagcctcccaaagtgctgggattacaggcatgagccaccgcgcccggcccatgaagggactttcaaaagagaagacattgtctctgtctccccacttttccagtctagctggggatgaaagagtgtgtatgaagggaatggacaggacacatgccgccacccatctgcggatgcaaaggaaggatttatatgccaaggtgccccagatattggagcatttgaagctgagagatgggataggaaaagcactagatggagagtttggggacctacatcccaaccctggctttgctactcataccctgtgggacattgtgcaaacctccttaccctcctcacccaaaggaaggggtgttcctgaggatctgaaagcctcctcttcaattctgtgctgttgtggtttcaatgggggtggagctagacaggagaggaatcctaaagaaagtaagctttgaagagaaccttgagcaggggaaaggtaggacatggaagagggaagtggcactgcacataagagcttggcagaggcaacaaaggaaagaagctcattcttgaatgcttcttaaagattagctctggcacagttcacagtaaagagcacccgtaggttcttttggagtttctagttgtccaggacaaatatgggcttagtcaagacactcctccacccagaggctaaagctcccagaggccccagtgtctgggattcattgctacactgggctcccttcctcggccgtggcctctccttgctttggaaagacagtccagcagcaaacactccctggagaccaaaggagtggaaaagaagtggttttcaacctcagaccaccaggagaccttccttattaattcctacctgcttgctaccctcgttctcatctactgccatttcagaaacatgtgtaagccacagagaacagcaggtgttataaatctgtgtgccagggccccaatgtgactttgcttctcagatcaccatagccttggacacaatcaaagactggtgacaattacattgctatctgacttaaatccctcagcccctcctgttgcctgagacttccaaattctggggttcttccttctcttctccaaggctatcaaatcccctaagttaggggtcagcaaactttttttttttttttgagacagagtctcgctctgtagcccaggctggagagcagtggcatgatcttggctcactgaaacctctgcttcttgcttcagcctcccaagtagctgggattactggcacctgccaccatgtccaactaatttttttttttttttttttttttagtagagacagagtctcactatgttggccaggctggtatcgaactcctaacctcaagtgatccatccgcttcggcctcccaaagtgctgggattacagatgtgaaccaccacacccagccaggggtcagcaaacttcttccataaaggaatagatagcaaatattttaggctgtacaagccatatggtttctgctgcaactattcagctctgctgttgtagtgctgaggagcatagctatattccaaaaaaaatttacttatggactgaagtatgaatttcacattttcatatattatagaatacttatttttatttttatttatttttttaatgagatgaggcttcgctatgtccaggctggtcttgaactcctggactcaggtgattcacctgcctctgcctcccaaagtgctaggattacaggcgtgagccaccgtacttagcccctattatttttttagagacaaggtctcctctgtcacccagactggagtgcagtgtcttgatcatagctcgctaaaaccttaaactcctagattcaaatgattctcctgcctcagcctcctgagtggctaggactacaggcacgcactcctacacctagctaattttttatctttttttttttttgaaatggagtctcgctctgttgcccaggctggagtgcagtggcgcagtcttggctcactgcaggctccaccccccaggttcacgccattctcctgcctcagcctcccaaatagctgggactacaggcgcccgccaccatacctggctaattttttgtatttttagtagagacggggttttactgttagccaggatggtcttgatctcctgacctcgtgatccgcccgccttggcctcccaaagtgctgggattacaggcgtgagccaccactcctggcccgctaattttttatcttttgattttttttttttttttttttagagatgggggtctcactatgttgcccaggctggtctcagactcttggcctcaagcaatcctcccatatgggcctcccaaagtgttggaattacaggcgtgagtgaccacgcctggccttcatgtgtcacaaaatattctcttcttttgactttgtcctaagcacttaaaagtgtaaaaattcaagttaaatgtcagaaacgaaaaaaagtgtaaacatcattcttagctcatgagctatacagaaacaagtgaaaggctgtatttggcccacaggttatatagcttgccaactcctgaccagtgtttgcacctctttcagccaaacttagatggtccaagcctttcaatgatcatagcttttctggctaatccaagtgggttgtcccagtctccaaggatggcaacagctttaagttccctaaaagtagccttaccctttcagctttattttctcttctgaagtggcttgattagagggtgctagagagccacccctccttcccatgcccctagctataaactggtttccccagtacatttccacccattctctctctcgactatgtgcacctgggccttaccgagtcaccttagtccctactggctggggcaggcctcatcactccattttgttaaattctctaccctggtgttgccagaactctggagccaatgcctcttttattaagggagattttatatacaaggaaagcttggaagaggtcagccagaggtgaattcctggagcagggggattttaagctgagcttcacaggcacagggtcaggaattagaggagggaagagagaagcgtggtgttccagacagaagcaggagagagtgggctgtgagtaggtgacagggaggggacagtccgcaagtggacacccacaggaagtgagatagatattattctgaggaattggtcttgggaagggaggtggcattggtggttgggttggccagttagacccagaaaaccctgattcagagcagctggagataacttgacctatggcatgagaggagaactcaagagtctcaacttccagctctgtttttgtttttgtttttgtttttaacggtccagaagtcttttatttatttattttgtgcctattatgctatgaattcatagggaacaggttccagcagctcagacgccttaccattggttttcacaatgtgtgcttctctgggtggagcaggctggcgcttcagttgaacccacatacttttctctttggcgtctttctttttctgatcatttattttgatatgtttcaggaagcgattccagctctcagagtgcttaatgtgctcaataagtacattcattctcttgacaagattcttgcccttgtttccaacaatgccaacagcttgctggtaacactgtagactcttttgagttttgccatggaaatgtttgtggggaattcctttttgaacagcacccattctcttgatgtctacaatatcaccttttttttttttttttttttttttttgagatggagtctcactctgtcgcccaggctggagtgcagtggtgcaatctcggctcactacaacctccgcctcctgggttcaagcgattctcctgcctcagcctcctgagtagctgggattacaggtgcccgccaccacgctcagctaatattttgtatttttagtagagatggggtttcatcatgttgcccaggatggtcttgaactcccgacctcaggtgatccacctgcctcggcctcccaaagtgctgggattacaggcgtgagccaccgtgcctggcccgcttgcattttcaaacagcactccccaccctgtgagaaccactaggtaggtttgtgaggtaagcagtaaaatagtgttaggctagaaaggggtagccagtacacggagaaccttgaatgtcaggacaagacattgcactaaattgaaggttcttcattgtggaggggatgagatctgctttagaaaaatgaagtttgggccaggggtgttggctcacgcctataatcccagcactttgggaggctgaggtgggtagattacttgaggccaggagttcaagaccagtctggccaacatggtgaaaccccatctctattaaaaattcaaaaattagctgggtgtggtagcgcatgcctgtaatctagctactcaggaggctgaggcaggagaatcacttcaacctgagaggcagaggctgcagtgagccgagattgtgccactatattccagcctgggtgacagagcgagactttgtcaaaaaaaaagaaaagaaaagaaaagaaaaatgaagtttggagcactgtacagaatgaatggaagatctatgagaggcagaccaatcagttgcagcttcctgcgtccttctcacccaggtaattttcaatctgggtgggctgctttggcacaattattggtggattgcagaggtcaaggggaggacctaactgcacatcctggggctgatggctggaatgtaactagattatttgctaaggcgggatttgactaatattccactgtctttcctgtatttcaaataaacccatgagattaacacaacgctcctcctccccatcagtccacactggcggaagttgtgtaaaactagcagaagtcaggaaaatggcaaccctttgagggtttttctctcctctccctgcccagggtgcactgccttcttcgcccttcatagcctgaacaagggaactattcagcccgaccaaaggggagagggaggaagacacttcctgctctcccttccctggccaggacaggacatggtttttgatccaaggcccagagaatcccgagctgataaaggcccattgtggcagtttctggagaaacccagaggccatcaggggctaagaagctggttaacagcccttgaacatttgtgaaaagaattacttggcggaagtcaaggcaaaatgaggcccctgggctgccactgggatatgcctttgccatccctggcagggaggctaatggcaaagccagcaggaaacctggccctcctgccactgaaagggctgacctgaaggcactagcaacctcaaagcagtgcaaggcagctttgcagctcagggctcccctacagacacctggaggatgaaacccaatctcccgccaaatgcaggaaacacaactgctcttttaaaaagagcctgggaaagagagaggagcctcctgtcctcccacccccaaaagggtgtccaaagcaataaacagcaggaaaaggaggaagggcgcagagtggaagctggtctggaacttatttaggaattaggctctttctgctccaatctttaatgcgctttgagttcaggcacctcatcattcgaaagcctattcttacagcaaaagagccaaagtgggaagagatatcctgaggcctgagataaatgatgctggggaggcggcagggagatgggctggatgcggggaggctcacgggagggaggtttgaggtgcagctgagggtcaggagcccaccacacactgtggtctgctcccgggatggctgctgggaggccctgggaggggtgcaggatgcagggattgggagaactcaatccctggctccatcccaaatctgtgcatcgggtctccctcttccccagctgacaggtggtggcccgatcactctgggggaggaaatgtggaatccaggtcagagagcagcctgtggagtcttcttaaagacccctctctgtggccaggtggtgagcctggggattaaatgaagagcagatttaaagcacagtcagtgctgtccactcactgcatgctgtttccactctgttcctagaaggatttggggtgggtgattgacacagttcatttctcaacctgcggtgggctttccctccccatcatccaaaatgcacaaactcagctcccctcaaatgccaaggcatttccaatttccctattgtcaaagcaaagcagaataagcaatacaaacccactggctgggcgcagtggctcacgcctgtaatcccagcactttgggaggccaaggctggatcacttgagcccaggagttcaaaatcagcctgggtaacatggtgagacctggtctcttataaaaaatacaaaattagccaagcatagtggcacacacatgtagtcccagatactcaggaagctagggcaggaggatcacttgagcccaggaggtcaaggctgcagtgagccatgttcatgccactgcactctagcctgggcaacaaagtgtgaccctgcctcaaaaaaaaaaaaaaaaaaaaaaaaaaaagaaaagaaaaaaagaaagaaaggaaaagaaaacaagagaaaaaaaaaaacctactgcagagtgccccaagccatctaactgagggctaccggacacattatttacgtcaaccacttccctagcattgggggaaggtgttgctggcagttggcgggcaggcctgtaactcccagtgagtagtggcaccaaaacacacagaacaagttaactgccctccacctaccttcactgcctatcccatgacaaacctcacctgctaccacagagattcccttcgggttggggatggatctggaacacaacacaaagtgttttctgaaaacaaagcattttctgccttactggagactctgtcccagctggcaatgcaaacatgtacacacaaaaactgctagaacactctgttctgatcccacggctcccacaaacaaaaaaccaacccatggctgagccggaaggtctgggtgtcatttattgacagcagtttatacacatttgtttccttcccagtgcaggcatagagcccgtgagaagggcagtctctgaatgagggggccaggaacgtaggtcggacacgtctttggcaggcatgttcagccccagcaggatgcaatccttcaagttggaattccactgggtatctgagagggaccaaggtggggggtagagaggaagtcttcaacaggactcacatctcggtccaggcctcctctctcactatacaagtccatccaagttttaggaccctggggggcaacagtcaggcccacccacctcaacaggggcagattcttcaatctgtgcccagttcacacacacctgtttccgctggtcacacagttaaagagaatcagacttatggtaacagacagaccacttcctctctgcccctccccggcacctctcttcagcagcatctgcacaggaaccgctgggaagacggaggcctgccttctcagttcagccgcacatgccctcatccgcaaaccttccatcagtgacaggacggaggccacacgtggatctaggcagacacctgtgctccccagtccatcacatactgccccgcctgcgtgctgccaaatgctggtgcccaggccggaactccagcaggccccgaattgggacctaaagctggtttgcataggcacttggcaatttttggtagggaggtggataaaaaagtagatggatgtgagaagaatgaaagagtttcatttgatagactaattagagatctgaagtgattttacctttatttccttcactttaagccaatcatgaaatttcacagtgatttctggggtgggagcagaaggaaggctgtgttaagaatcatcggggctgtggcccagtcagcccgcggaggtgcaggcagggtgggccctcactggggcagctggaggagcacggactgccccgctggcaggtaggtgatgttccgagagcgtgagagctggtacgcgatgtcctctgcagcttccagcttgcgcagctcgatcaggccatcccctgcagtggccagtgagttggcaatcagctcagctgccttggagtcgccctcagcagagatgatggccgcctttttctgttgctcagcctaaaagaatggaggtggagacaaagatcaaacctcagggcaccgcatgtcaggctacaaccaaaggcccttcaccagaaagccaccttcccaggctcctgaaggaactcggggagtttacttcctcctgatggctagcgggggaagcggggggaagcagagcacattgcccaccagtcctcccctatcctttcatgctcactccttgtcacgggagggatacatctctgttggctgcaggaatatttgtcttatttcaaagtcctcattaatattaattgcaatctagtttaacaaccctactctgagccaggagaagccaaggccaaggaaaacagaagcaaaagaaaggtggaatcaatcctcaaggctcatcttttcctccagccttaagtctaaaggacttcatcaaagccaggacagggccgggtgtggtggctcatgcctgtaatcctggcactttgggaggcggaggcaggaggatcacttgagcccaggaggccaaggctgcagtgagctatgatcatgccattgcactccagcctgggccacagagctgtcacaaacaaacaaacaaacaaacaaacaaacaaaaaacctcgggatggctaaggaagagcagcatgcacttttgactgttcctagagctgcctgtgagttaggctggttcctgaccagaatccaggcacccagagtgagatctcctaggcttgccctaccaatatcaataggaagacagctctctgcaacgtgtgaccttcaggagtgtgaggaagaagacagtattaagcctccctgaaattacatacaattttgaaatgactgggccctgcgtctatttgctcaacaaacatttactgtatacctactatcaccaggcactgtactagacttattataatctctgaagttatggcagatacaaagcaacacaagtctctgcccacacagtgttttcattctccaaaattaaatctatccctcttttcccattttatttcttgctgtccccatctccccaccaattagggatactggtggtgggaagaaggggacaacaataaatgaacatgtctttgcaaataccagaaagaccaggctgctacgcaaatacactgtgtcccatcacattctttgacacatctggatggatttagcactagaaaaaaatctagtgacgaaagcacatctggtgcaacgtttgatcttttttgctgtcagctttcactatgtaactatggttaaaaatgacttctcagtgaagctgaaaatactccaggagaaacatttttatttgtaagagagtgtttttgatctcagagaagtggaagaaaaattacccttcagtgatttaggaacataactccacatatccttgactagcccctgaagactctggaaccaattgcagaagtacaattccttcaagccccttctgattatcccggaagaagggatgacagatgatgaatttccaggccacccagcaaatggggaagctgagtgccggagaaaggggagagagaggctcctgccatctggtcgaaggctcaccttttccaccacaaatctggccctctctgcttcctgctgagccacctgtttggcttccaccgcttctgtgaactccttcccgaaggtcagatgtgtctaaggggagagagtgagcacaagatgaggcagtgtgattgcttcgacagcactgctgggagggctccatggccgctggaagaagaggccagcaatggctctagcagctggaggcatccgtgaggccagaacactcttccacctccgtatctgtatccaaactgagtttacacccagactctctggctgcccaaactgctcctgtatattactctgtcactctcagtacagtgacctcatgtagcaaatggcaccgggggcttttgatggggcccacaggcaccagaaggtatctactcaatcgaccacctccccagaggaggagaactgtgggttctaagacccccgccactgactagtgctcttccaagggcctttgatgccttgttcaaagcccaaggaaggccagatggaaaacagggtccctgagagtgagggaggcagctggttcccagggatccaagagcctgatgctctctgtttatggattaaccagtccgcgtcttcccacagcagctccaccactgaacaggaagaggacgagggacggtggaacgcaaatcatggtattcccaatgtgaatggttctgttaaacggtttaaaagaaagagaaagcaggtaaagtcattggtcggcatgagggtttagaagtctgatgatccatagaccttccctaatcatgtcaggtctgacgggactgtccctaaagatagcacaaacaatgggaagggacctcagaattcctaatgcccagcctagagcaatttacttattcatcctaatttttattgaaaaagaatcaagagaagagcattggttttgccatcaaattctagttgtttcatttcctccactctcccaacctctgctttttaaaaaagcagctccaaacttctcctgaagagtaaatcctggtctcattctcttccagaatttttaacctcctaactctaactgcagctgttgtacttcgcctgatccatttctagtttcttagtcaaagtttgggtaagaaaatctgatcctgagacatgaaaaatgaaatgtataattaaggaataaaatttatttctacaagggccagctgagggcagcaaattccccatgaaacctaattttcttctcacaccttagatagggtttcttgtggtcagcccacatttccccagaatggagtatgtggttaaagtctagtaaaatgccaacttttcccttaggtttttactcagcgttttctcacagccaaggtgttcaggttaacggtaattacgagggaagggcccacagaatggctgcagcctggcctcttgccagcagagggagccccaagcccccaggacttccagcaggcggagcaaggtggagcagtgcccaggggttagcactgggtgttgtcaagtggctgtttaaacagctgcacagatgccgggggaggcagtgcctttccctagcaatgcacgggagaactgaacaggaaacactttacctcactgcccgaacaaatcactccaaatggtttttcccagagaatctagaaacacgaccccttcccctcaccctcctcaacctgaaacgctatcctgcctgcattgctttctgagttatgacatccaatgtcatataaacacacaagctatagtgtctcaagaggatagcttacgcctcagagatgtcccttgccccctataccaggcctgggggaatccaaccgttcgtttacactctatcacctttcactggggttcccagagcttacttcactgagcttcggactgtaaagtgttaggaagctcccaggagtcaggctgggaggtctgtgctagggagaaggactacccgagctgttctctggtctctaccaggcagtttctgcctgtgtcaaacagggttaacaaggcatcactctctgggtaacagtttggagaaggtaaaacatttagtggttagagactatctggatacaaccagaggtcataagaaaaatgtgtgtggcagggggaaggtaaaagaaccctcaactgaaaaacccacggagactgcctcacctcagcatgtttccgtgttttcaagtctcacatctagcaaagcagaagggaggacctaatagcgtctacccagaaatggagccaggcacctaaacgagaactgcagccccttcccctcctcggtctcccgaaggatcttaccaaggacacgtcatccaggatgagcccaaaggtggcggctcgctctgtaaggtcgtcgctcacctgcctggagaccagctctctctgggtgattagttctccagcatcaaagcgagcctggtttcaaagggaggagcagaagggcaggtcaggttaatgaggaagcagaaaaggaaccaggaaactagcagccacatcccaaccaacccactgccaagcgcttcctgccacctggcaccctcccagggtggtgctctgggctcgaggctaaaggcccctgttcactcaccaccactgacttgaggatctcagttgtgatggacggcagcacacgctcatcatagtcctctccgatgctggtgaagatgcgaggaagctggctggcgacaggccggaagaggatgcgcagtgtgatgttgacattctgtaaatcttagggtaggggacaaacactggagttaaaaataaaaaccactgtaggaaaacaagtgttttttttttgtttttttttttttttgagacaggtttttgctcttgttgcctaggctggagtacaatgggacaatctcggctcactacaacctctgcctcccagattcaagcaattctcctgcctcagcctcctgagtagctgggattacaggcacgcgccgccacacccagctgttttgtatttttagtagagacagggtgtcaccatgttaggctggtctcaaactcctgacctcaggtgatctacctgcctcagcctcccaaagtgctgggattacaggtgtgagccaccgcacctggccacaagtggtcttttatatgacctctcctactccaatttgctacaatttttatttatgtattttgagacagggtcacatgttgcccaggctgaagtgcagtggtaagatcacagctcactgtagccgctttgacctcctgggctcagttgatcctcccacctacaccttccaagtagctgggactacacaggcacagaccaccacgcccagctaatctctgtactttttgtagagctggggtttcgccatatttcccaggctggtctcaaactcctgggctcaagtgatccaactgcctcagcctcccaaaatgctagaattacaggtgtgagccattacgcctggcaatttttattttttatttttagagacaaggtcttgctatgtggcccaggctagactcaagctcctgagcttaagcatttctcctgcctcagcctcttgagtagctgacacgcaccactgtgcctggctccaaatttgctacaatttataagcaaatctgctgattataagatcccagagggcaaggtgcaggtatgcctggtttccttggcagagaacccaatagagcatcataaagagtttataatttcttaagaggcttcagtgatagcagctttttggtatcccctgaatgccctcagatatacataattcagattatatgtctaacaggtgccatgcaaagtttgcaacactgaacattttaagacaatagacagggcaatgctaagaattgtagggtgaggcctttacatgctctggtgattgtggccaagtcaggagtcagccttggagaggttagttcgggtctggtggaaacggtgttagactatcagtccaaagatctgggctatttactaatgatgtggcctctctaagccttagccaacctgagcttatttccctgtctatgagaatggggacaatttcatttgctttctgggccttgcggaaatgttggggaaaattgaaggagaaaacagacgtaaaagcactctgtcaaatgtgtaacacatataaggggttaacagactgatcctatgttctgcttctcattacttggaccatttaaaggatccagggagagaattatactttcccctggacaattcaggcctgcctggagccaaagcactgtcacggcttgcttacagatgtcaacaatatggaccaagcgcccatgagacagccctgaactgggcaccaagagaggtgggcaatgtattaatacctacaactccctgatctctggaagctcctatcaatagttttagaaataggtacataatgtatcctgaaaacaactgcaaaacagtacggaaagaaattccaaagagatgggaagattagaagcaggctttttttttttttttttttgagacagagtctcactctgttgcccaggctgcagtgaagtggcacaatcttagctcactgcaacctccgccccccaggctcaagcaattctcctgcctcagcctctcaagtagctgggattacaggcaccccccaccaccggctaatttttgtatttttaggagagatggggtttcaccacattggccaggctggtcttgaactcctgacctcaggtgatccacctgcctcagcctcccaaagtgctgggattacaggcatgaaccaccgcacccagccataagtgggtatttctaagattccatatcaagctctccagggcaagtagtctagtcattcctatgatgtacagttcaaactcttttggatcctggtatcccacagatgctcctgtgacacagaagaacagagcacctcttccacactccctactttacctgaaccataggcaagactcacctttgctaccagtgatgactggcacattacgtggtcgagaacggcagtcaaagataattggtttctgtacccacgggatgagaaaatgagtcccttcccctaccacaatgtcctgcactccacggaatcggtcaaagatgacagctctgtgcccagcatccactaggaagaaaggacaatgacatgtcataaaaatcctctcatcctttaaacaaaaggatcatgtctttgaaagagccctggtgctttctgttcacttattaagtctcccctcttctctctgtcttccccaactcctggtctctagagacttctaactagctgcaaaactaagcagtcacttcctgttccacatgtccccaaggattggtaataggacctgttccttagcatcctttctccttgagggaactggctgttgattttctgaatgaccattctatccctgaactcccaccaacatatttccaggaatcatctaccaaaacttctaaaactcagtgaggtcttcccagttaccacatatccatcgggctccaatttaacctagtgctcccagaagtagcaccctcattatgggaatcctacatttcgaagagcctactctttcttcctaatagctctgtttcgctaaagttttaaggggttatagagctgtcttggcacagagagaaatttatgatggcaatttctgtctagttgcagatgtggccaaaaggatcacagtactgctaagatgtgtcatataagccaagcaggcttttctaatcagctgcctctctgaactttatcattggtccaaatatcttcactctgaaagtaaagctcctcttgtcagccagccacacaccggatgggtcaatctattgctgctttgcagcatgtgaaagtgtcagaatgtcagaattaaaggaggtcctacagataaagtcaggtcaaatccattgcttgaccaatgaggaagcttccacagtaaagtggaagaaaagccagcttaacctccctcctacactgttaaaagctgggcaatgcatctcaaagatactttctctgaaactacccgaattcagcacagcaaaagttcctgttcaggacaaggtcacccaaacagatctgcagcctttgctgttattccacatgcaagcagaggagaacaaatgagatctccatttcagatagccagggaaatccagacactgtgcggcagcatttgggtggtgcggcttcacttcaccttgacagaagccactggacacatccaactaggaagtgggctgggaagctctttttgaatacaggctctgagagaacctatgactgaaaggtcaggggctctgataacaatgcagtcctgtggtatgaaatggcaggaggtgagccctcttggccacaaacacattcactgacggcagctaccatcaagagtgtcacatgggctatgcagaccaacagaaaactcctaggaaagtgcagtgacccactgtccctccatgcctcaccattatataaggcagagttcaccacgcctcctgcaacagctaaggccaggccaaacttgccaatggactcaaacactttggcagccatgtttccttctgctggaccctctcacacctaaggggataaaaacaaaatacaatcaaacttgatgccaaatcctcagagaaggccctctctgacacacaacagtcacttttcaacctggctatttatttccccattcctgaaagtgctaaatcatccattgaaggatacctaataaataatgctttatagcttggaaagtgtactatcaattcttctgctttttttttttttcagtttcttttctttcctttttttttttttggagacagggtcttgctctgtcacccaggctggagtgcagtggtgcaatctcagctcactgaagcctcgacctcccaggctcaagcgatcttctcacctcaacctcccaagtagctgggaccacagaagtgtgccaccatgcccggctaattttgttcattttttgcagagatggggtcttgctacgttgccccaggtggtctcaaactcctgggctcaagtgatccccctgcctcggcctcccaagtgttgggattacaggcatgagccatcatgcctggctgatttctctttttttctcaaccatttaaagtaaggtgtctgggacacttggttcaataatgaaaacaatgcatgggcttgaaatccacagagaacttagcaccacactaaaccaccctctcatttcctggacaagtaggcccccaaaaagaggctgtgaggttagattggtgcaattatggtttgaaaaaaataacttaaaaaatgtgctacatgttgatgccaacaaaaaaagtaaccgtaacagctaacacttatatcaggtagcctaataaaagcaatttatttacttctcacaattaccctatgaagcatattactacagaggaaacagaggcacacagagaggttacatgagaagccgagattgcagttattaagtggtagaaccagaattagaacccagaggtctaatgctagcagacacagcttacctcctcaccatactgcttgtcaacatcgtgtattaagaacgacatgcttcttatggaagcaggagctggatgacatcctggggccaagataactgaagaacccatttgggagaaaggctctaactagctgcacagggacagtgagctctggaataactgggagggtggggctgaggcggggtgggcataagcacagttgacctaactagaaatcacgccagcatgtaactttctaacgctccgccccaccgtcgttgcccgctccagtctcaaatcctccctccctacttcccagacctcaactcctgagactaccctgatctcgtccagtgcatttaaatcttccttctctgaggctgggacacccggccctttacatttgtaatagcttctggattattcctcaccctgcctccatggacacctcccttactctgagcaacccctggctcgtcccgggctcagccccttctcccctccctcacaagtcggactcacgcacgcactctcctcgcccaaagtgcacatcatggagcagaggaggactgcagagatgcccagaaacgagcctttgccgccccctccattctcacctgcttccactctgacctccacatgaattccccaaccacacatactgcgcatgagctcctctgccccgcccgctttccaagatccacgcttcctattggtgtggaagagcgctgtgagttctgggaagggtggcttagaacctcaccctggttctgcggctcttagcagatgaactacaactcccaaaaggctatgcagcggcgggcccgcggagaaaagcgttttctctttggtgatcaacgcgaggatgttgccgcaaagccttttgggggctgtagttttctggggctaaatgcacgtgcctatcctgtacagaggctaagactgccgcaaggagagccttagggctccgggaaagaggaggtgggcgtccagctggtggcaaaaattagtaggggcaagttcatggctgatgaagaggacaggtggaactctggaggaagtcgtggtgaaatcaccggcaggctgagaccctttgggggaaacgaagggccgtcttccttccaaagccctgtctgcaaacgtcctcagagttgtgagacgttgattaccagacccagagagaaccatctgtgctgaaaaactgagaccaaccgagaggaaggaattcattcagggtcatgcaccgagtgagaaaaggggctcggcttggaatccaggtcccctagacatgattttagagaaacgttttatttggaaaagttgcaagaatagggcaaaagaacgcacgttaaactttggctcagattcacctattgttaacaatttgcttcatttgttttatcatttgtttcttacctctcccctcctcctccctgccgccactccgccgccccacctccgtgtgcgtgtgtgtttattttcttgtttttgttttgttttgttgtttgtttttgagatggagtttcgcttttgttgcccaggctggagtgcagtggcgcgatctcggctcaccgcaacctccgcctcccgggttcaagcgattctcctgcctcaccctcccagaatagctgagattacaggcatgcaccaccacacccggctaattttttatttttgtagagacggggtttctccatgttggtcaggctggtctcgaactcccgacctaggtgatccacccgcctcggcctcccaaagtggtgggattacaggcatgagccaccgcgctcagctctcattctagtttttacctctataagatcaactcttttagcccccacataggaataagaacgtgagggctgggcgtggtggtcacgcctgtaatcccagcacttcgggaggccaaggacagaggattgctttagcctaggagtttgagactagcctgggcaacaaattgaaaccctgtctctacaaaaataaaaataaaaagtacctggatgtggtggcatgtacctgtagttccacctattcgggagccaaggtgggaggattgcttgagcctgggaggtcaaggttgcagtgagctgtgactgtgccactgcactgcagcctgggtgacagagcgagaccttgtctcaaaaaaaaaaaaaaaaaaaaaaaaagtatggtcatttttaacaatattaattcttccaatccaccaatccatgaacacgagatgtctttccatttgtttgtgtcctcttcagtttctttcatcagtgttttgtagtttttattgtagaggtctttttcctccttgattaaattttttcctaggtagtagggttgctttcttgatttctctttcagctaattccttattggtgtacagaaatgctagtttttgtataatgattttttatcctgcaactttactgaatgtatcagttataagagatttttggtgaaatctttagatttttctatatactaggtatcatgtcatcttcaaagggggcaatttgattttttttttttttaagactactcaagtgcagtagtgagaagtggggaaagagtagaacaaggagttcaatctgtaacttactgtgagattgagataactcactacattcgcactggcctgacttccttttttccaatttggatgccttttatttctttctcttgcctggttgctctggctaagacttcagtactatgtggattaagagtgatgaaagtgggccgggcgcggtggctcacgcctgtaatcccagcactttgaggccaaggtgggcggatctcctgaggtcgggagttcaagaccagcctgaccaacatggagaaaccccgtttctactaaaagtacaaaaaaaattagccgggcatggtggcgcatgcctgtaatcccatctactcgggaggctgagataggagaaatgcttgaatccgagaggcagaagttaccgtgagccgagatcacgccattgcaccccagcctgggcaacaagagcacaactccatctcaaataaataaataaataaataaataagtaatgaaagtgggcatctttgccttcttctagttcttagaagaaaggcattcctctattcccccattcaatatgatgatagctgtgggtttgtcatttatggagtttattatgttgagatatgtttcttctatgcctaatttgttgagaatatttatcacgaaggatgtttaattttatcaagtgctttttctgcatctattgagatgatcatatggtttttgtccttcattctgctgatgtgatgtatccgcggttattgatttatgtatgttgaaccgtctttgcatttctggaataaatcccacttgatcatggtgtattatccttttgatgtgctgttggattttgtttactagtatttagttgaggatttttgcatcgatgttcatcaaggatattggcctgctgttttctttttttgttgtgtttttgtctgattttggtgtcagggtaattctggccttatagaatgagttaggaagaatttcttcctcttcagtttttttggaatagtttgagaaaattggtattatttcttctttataagtttggtagaatttagcagtgaagccatctgttcctgggcttttctgttttgggagactttttatcactaattcaatttcatcactcgtcatgggtcttttcaagttttctgtttcttcctggttcaatatttgtaggttgtatgtgtccagttatccattttctctaggttttccaattttttcatgtgtagttgttcataatagtctctgatgaattattgtatgtctctggaaacagttgtaatgtctcattttttatttctgattttatttatttgggtctcctctcttttcttcttgttgagtctaactagcagtttattgattttgtttatccattgaaacaaacaatgtctaatttcattgattaaatttttttcactctctgttttgttttgctatgctgtaatcgttattattcttttccttctcctaattttgggtttggtttgttcttgcttttctagttccttgcggagcattgttaggttgtttatttgaaaactttctagttttttgatgtaggtgcttattgctatcaatgtctgtcttagcactgcttctgttgtatcctatatattttggtatgttgtgtttccattttcttttcttttcttttttctttttttttttgagatggagttttgctcttgctgcccaggcttgagtacaatggcgtgatcttggctcaccgcaacctccgcctcccgggttcaagccattctcctgcctcagcctcctgagtagctgtgattacaggcatgcaccaccatgcctggctaattttgtatttttagtagagacagggttcctccatgttggtcaggctggtctcaaactcccagtctcaggtgatccgcccacttcagcctcccaaagtactgagattacaggcatgagccacagcacccggcctgtgtttccattttcatttgtttcaataaattttttttttgatgttttacccaataatgattcttttctttctttttttttttttttttttttttttttttagtatttattgatcattcttgggtgtttctcggagagggggatgtggtggggtcataggataatagtggagagaaggtcagcagataaacacgtgaacaaaggtctctggttttcctaggcagaagtccccgtggccttccggccttccgcagtgtttgtgtccctgggtacttgagattaggcagtggtgatgactcttaacgagcatgctgccttcaagcatctgtttaacaaagcacatcttgcactgcccttaatccatttaaccctgagttgacacagcacatgtttcagagagcacggggttgggggtaaggttatagattaacagcatcccaaggcagaagaatttttcttagtacagaacaaaatggagtctatgtctacttctttctacacagacacagtaacaatcttatctctctttcttttccccacatttcccccttttctttttgacaaaactgccatcgtcatcatggcccgttctcgatggtcgctgtctattcggagctgttgggtacacctgcagaaaggctgtcacttcacacttggaagattgcacagcggccaggcagaggcgcttctcacttcccagacagggcagccgggcagaggcgctcctcatttcccagatggggcggccgggcagaggcgctcctcacttcccagatggggtggccgggcagaggcgctcctcacttcccagacgaagggtggccgggcagaggtgctcctcacatcccagatggggtggccaggcagaggcgctccccacttcccagatggggtggtggccgggcagaggcgctcctcacatcccagatggggcggccgggcagaggcgctcctcacctcccagatggggcggctgggcagaggcgctccccacttcccagatggggttgcggccgggcagaggcactcctcacatcccagacggggcggccgggcagaggcgctccccacttcccagatggggtggcggccgggcagaggcgctcctcacatcccagatggggcggccgggcagaggctctcctcacttcccagacgacgggcggccaggcagaggtgctcctcacctcccaggcgggccagccgggcagaggcgctcctcacttcccagatggggcggccaggcagaggggctcctcacatcccagacgatgggcagccaggcagagaggctcctcgcttcctagacggggtggtggccgggcagaggctgtaaccttagcactttgggaggccaaggcaggtggctgggaggtgaaggttgtagcgagccgagatcacgccattgcactccagcctgggcaacattgagcattgagtgagcaagactccgtctgcaatcccagcacctcgggaggccgaggcgggcagatcactcaaggtcaggagctggagaccagcccggccaacagggcgaaaccccgtctccaccaaaaatacaaaaaccagtcaggcgtgggggtgcgtgcctgcaatcccaggcactcggcaggccgaggcaggagaatcacgggagcccgaggcagggaggttgcagcgagccgagatcacggcagtacagtccagcctcggcaacagagggagaccgtcaaaagaaagaaagagagaaagagagaaggaaaggaagaaaaggaaggaaggaaggaaggaaggaagcaagcaagcaagcaagcaagcaagcaagcaagacattttttgatatccttcttaatttgttcattgacccaatggtcatttaagagtatgttgttggccaggcgcgatggctcatgcctataatcccagcagtttgggaggctgacatgggtggatcacttgaggtcaggagttcaaggacagcctggccaatgtggcgaaaccccactctattaaaaatacaaaaattagccagttgtggtggtgcacacctgtaatcccagctactggggaggctgaggcaggagaatcacttgaacccaggaggtggagattgcagtgagccgagattgcaccactattccagcttgggcaacagagtgagactctgtcaataaataaataaattaattaattaattaaataaaaaatgggccaggcatgctggttcatgcctgtaatcccagcactttgggaggccaaggctggtggatcacctgaggttgggagttcaagtccagcctgaccaacatggagaaaccctgtctttactaaaaacacaaaattagccgggcatggtggtgcatgcctgtaatcccagctactcgggagggtgaggcaggagaatggcttgaatcctggaggcagatgttgtggtgagctgagatcacaccatcgcactccagcctgggcaacaagaaggaaactccatctcaaaaaaaaaaaaaaaaaaaaaaaaaaagtatgttgtttaatttccatgtgtttttacagtttccaaagtttctccttttattgagaagatacttgatatgattttgattttttaaaaatttctaagacttgctttgtgtcctaacatatggtctattctggagaatgttccatgtgctgatgagaagattatatattctgcagctgttagatgaaatgttgggtaaatgttaggtccatttggtctggagtatagtttaagtccagtgtttctttgttgatttctgtctagataatctatccattgctaagagtggggtgttgaagtccccaactattactatattggagtctatctctttatttatttatttatttaggagacagggtctcactctgtcacccaggccagagtgcagtggcacgatctcagctcaccacagccttgacttctcagactcaggcaatcctcccacctcagcctccccagtagctgggactatagatgcatgccatcatgcctggctaattttttgtacttttgtagagatggggtcttgccatgttgcccaggctggtcttgaactcctgggctcaagtgatcctcccacctcagcctccgaaagtgctgggattacaggcgtgtgccactgtgcctggcctatctcttcctttagatcaaatcatatttactttatatacctggatgctccaatgttggttgtatatatatttagaattgttatatcctcttgctgaattgatcctttaatggttatataatgaccttctttgtcctttttttttcagtgtttctgacttaaagcctgttttatgtgatataattatagctatttctgcttgcttttgttttccacttgcatggaatatcttttctcatccctttactttcactctaaatatgtctttacaggtgaagttagtatttttataggcagcatatagttgtatcattaaaaaaaatatccaggccggacatggtggctcacgcctgtaatcccagcactttgggaggccgaggcgggcagatcacctgaggtcaggagttcaagaccagcctgtccaacatggagaaacctggtctctactaaaaatacaaaattagttgggcatggtggcagccacctgtaatcccagctactcgggaggctgaggcaggagaatggcatgaacccaggaggcggagcttgcagtgagccaagattgtgccattgcactccagcctgggtgacagagcgagactctgtctcaaaaagaagaaaaaaaaaatccattcagccagactatgtcttttaagtggggaatttagtctgtttacattcaaggttattattgataggtaaggacctgaggacttattcctgtcatttttgtttgttattttctggttgttttgtgtatctgttgttcctttctttctctcttattgtttatcattgcagtttggtggttttctgtagtggtaatgtttgactcctttctcattctcattcaggtatctgctctactagcaagttttatagttgcatgtattttgatgatggtagatattgttttcttgcttccagatgtaggactccattaagaatttattgtaggacctgtctagaggtaattaattctcccagtttttgcttgtctgggaaagactatttctcctttatttttgaaggatagttttgctgggtatagtagtattcttgactggaagttcctccctcccccactttcagcactttgaatatatcattccattctctcctggcttgctaaatttctgctgagaaatctgttagcctggtggggatttcgttttatgtgacttgatgcttttctcttgctaaatatatatatttgagatggggtcttgctctgttgcccatgctggagtgcagtggtttgattatggctcactgcaaccttgactacctgggctcaagagattcttttacctcaacttcccaaatagctggaaccacaggtacacgccaccatgcttggctaatttttaaattatttatagagatgaagtctgactgtgttgcccaagctggtcttaaactcttttttttttttaaagacaattcactgtacacattttatttacagttttgtacactgttttaatatgaatgggactgcttttctacttgagccatttttaaccaaagcaaaataacctaagtaatacaaagtgttaaaatacagcataaagatacaaaaacagacatactaattctagttaggaatgtaattatgatgttacattttttataatccacaattatgtttaggaaatcacacaaacatagatcactgatttgaatgaaatgcataaatttgtagcaaagctttgtagttacaaaaaacaaaaaaaattaccaaagaatgcacaaaattaatgtttattccacctttgtgtcatattcctggatccttcaccaatgttacatgaggaaaaaaacaaaagcaaaacaaatgaaaaactgaaatcagaatcactaatattatcaagtagggaaacaaataaattaaaatctagcagccatcagcaagagtacagcaaagacaatgctgtaaaaagaaacaaagaaaattgctagaaaactgtatgcatcataatctttcaaaccagcaaaatatgcttctgcataaaatggaacaacagaattttttttcctgtaaagtatagaaatgccaagttgttttctgactattgtggataggtaaaatctgtatgtaattaatggtaattctactgaactattacagagtgggccaggaacacatttatggattctggagatgtgtactgtaattctttgattgggatagtgtaaactctagccaaaaaaaaaaaaaaaaaaaaaaaaaaaagaacacagaagtacaagacaaaggcgaatgagacttctcttatatctgagtaacatttagatggaaatcaaatttaaatgcagtccactctgctttttgaagaggctttggttcagctcccaaatctcgattgcttgacgcagtctcctatgagaatactcagaaggtgtcttcttaaacaacaaacctatttttagtggtggagccgctcttagtagctgtgtctgcgtgggactgataaccaatcactatctttggaggaagtcctaacctttccttgtataccctccctatatgtgtaacagcttctctgttttcacattcagtagtccatattgctatcttatcacctttagctctaacattaacaacagcgccacatacatcatcactgtagtcatcaaaagattctccaataaggcacagaagtgtctctagccaaaagcgatcgaggtcacttcgtctctgctgtttgttcaatgtaattagccatcgtcctccccgtttgtttttctcatcttcccacataggctcaataccatccttaaaaagtgagtagtcacagccaggcattaaattactagacaactggatatggttgtacagagcccaaaagtcttcaacagtatcaaacttggagatcagccacaagtttgcttgccaagttttgcttttatcatttttaaaaaaccagagtgcccatctgttctgtaggggatgtttaatatagtgttctgggttagcaacctcctgattagattccgttttctccttttctgtagtcgggggattaggagtaggggtggtttccggttcgacggtcgccatcttagatcgatctcggtcttaaactcttgagctcaagggatcccccttccttggcctcccacagtgctgggattataggtatgacttaccatgcctggcctgctcttgctgtttgtagaattctctgtctttaacttttgactgtaatgtgccttggagaagaccttttgggtggaatctatttgaggatctttgagcttcttatatctggatgtctatatcttttgtaagacttgggggaatgttccagctattattttgttaaataggttttctatgactttgcctctctctttgccttctggaatgccccagttttaatatttggttgccttatggtgtcccatgtctttctttttcttcttcttcttcttttttttagttttggtctgactgggttatttcaaaagaccacccaaaaccaaaagctattagaactaacaaacaaattcggtgaagttgcaggatacaaaatcaacctacaaaactcagtagcatttctatatatcaatagcaaacaatctgaaaaagaaatcaagaaagcaattttacactagccgcaaagaaatttgtgtatttttatttttatttttgagacagggtcttgctctgtcacccaggctggagtgcagtggcgtgatcttggctcactgcatcctcaacctccagagttcaactgatcctctcgcctcagcctcctgagtagctgggaccactggtgcacaccaccatgcccagctaatttttgtacttttcgtagagacaaggtttcaccatgttgcccaggctggtcttgaattcctgagccaagcaatcccccctcctaggcctctcaaagttctggaattataggtatgagccactgcgcctggccaaaaattaaatagctaggaattaccgtaaccaaagaagtgaaagatctctacaatgaaaactataaaacattggtgaaagaaactgaagaggacacaaaaaaatggaaagctattccatgttcatgcattggaagaatcaatattgttaaaatgcctatactaaccaaagcaatctacagattcaatgtaatccctatcaaagtatcaatggcattcttcacagaaatagaaaaaaaaatcctaaagtttatatggaaccacagaagacccagaatattcaaagctatcctgagcaaaaagaacaaaactggaggaatcacattacctggcttcaaattatactacagagctatagtaaccaaaacagcatggtactgggcagggtgggcctgttctaaggcccctggatggtatgcatgggtggttggcagcagcagcaaacatgacagatatttaaactttttgatcttaggatgccttcatattttttaaagctgttaagtactgcaaagagccttagaatatgaattatatatttttcaaattaaaacaaaaaattaaatattacccacttacccatttaagaataacgggttgggcacagtggctcacacctgtaatcctgtaagcactttgggaggccgaagcaggagaatcacttgactccaggagtttgtgaccagcctaggcaacatagaaagacgctgtctctacaaaaaataaattagccaggtatggtggcacacctgtcccagctacttgggaagctgaggtgggaggattgcttgagcatgagggggttgaggttgcagtgagctgtgattgtgccactgcactccagcctgggcaacagagcaagactatctaaaagaaaaagaaagaataacagtaagaaacccattacgtgtttacatattattacaaaatataatgatagtttcccaaacaaaactatttagtgagaagagtgacatcatttgacatttttgccgatcttggattcttcattcaatttgttttgctatcataagtgataacagcctctgaaaaactctactgggcagtcaggagagaatgaaagtgtaaagaataaataatgacttagtatcatcacaaaaataattttgccttcaagtacccactgaaaggatctcaaggactggcagggttatgtggattacacctggagaacttccttagagtaaaacccacctctgcataacattcacacactcatccacctaagcttccaatgagtttttcagtgcttgtattagttgggatattgaagtttaagttgctgttccaaggagaccccagaatacagtggcctagagaagatgcaagttaatttctttttgctccacttgttgttcacagacccagtttccttttctattgttggtttaccatcccctaaaagattatcttcatctaagcatgggatgtctgttctagcttgcaggaaagggaaagtagaggaaattcagggcagcaattttgtttcaagcaaatgaggcagaagcagcacatacactttccactccattccattgttgaaaacttggttacatgacctgatgtagtcacaaagaaggattgaaaaatgtagtctttagccaggcagccaatatacaagaagaaaggatctgaggactaaccagccatctgcagtgcttctcttatttataaataatcagacacacatgatttaagtccatttgagaaaagccataacatgaaagagaaaaccaaaacaaacaaaaataaactaagcaaaacaaaaacaaaacaaaaggctgggtgtggtagctcacgcctgtaatcccagcattttgggaggctgaggcgggaagatcacaaggtcaggagtttgaggccagactgaccaacatggtgaaaccccatctctactaaaaatacaaaaattagctgggcgtggtgaagcgcacctgtaatcccagctactcaggaggctgaggcaggagaatcacttgaacccaggaggcggaggttgccgtgagctgaggtcgcgccactgcactccagcctgggggatacagcaagactccattttaaaacacacacacacacacacaaacaaaacaaaacaaaaacaaaacaaaacaaaacaaaacaaaaacttggctgaatcagagacaaggtaaggagcataggaaatctaaacaaatttaccctatcattgatatcttcaggtaaaaggaaagataactaccatacatgagagtagaacaagatgctattaagacaaaaaggaagagatgaaagatggaacatttcctcctaaaatcaagaataaagtaaagaaggtactgttatcacttttttttttgagacagaatttcgctctgttgcccaggctggagtgcaatggcgcaatctcggctcactgcaacctccgcctcctgggttcaagtgattctccagccccagccccctgagtagctgggactacaggcatgtgccaccacacctggctaacttttttttttttttttggtaatcttagtagaaacggggtttcaccatgttggccaggctggtcaccaactgctggcctcagatgatccacccgcctcggcctcccaaagttctgggattacaggagggagcaaccgtgccaagcctgttatcacttctattcaacattgtcctagccagtacaatagcctacagtaggctacaaaaatatatagaagtcatgtagattggaaaagaagttaaactgcccttattggcagatggactgtgtgtatatagaaaatcctaaagaatatagaaaaagctattagaactagtaagtgagtttagaagggatgcaggacataaggtcaacatacaaaaaccagcaacaaacatctggacattgcattttttttttttttttttggcagagtctcactctgtcgcccaggctggaatacagtggcgccatctctgctcactgcaacctccctccacctcccaggttcaagcaattctcatgcctcagcctccctagtagctgggattacaggtgtgcaccaccatgtctggctgatttttgtatttttagtagagacggagtttctccatgttggccaggctgatctcgagctcctggtctcaagtgatccacccgccttggccccccaaagtgttgggattacaggcatgagccactgcacccagcctgaaatgttttattttattttattttattttttatttttttttgagacagagtctcgctcagtcacccaggctggagtgcagtggcccgatctcagctcactgcaagctccgcctcccaggttcatgccattctcctgcctcagcctcccgagtagctgggactacaggcacccaccaccacgcccggctaattttttgtatttttagtggagacggggtttcaccgcgttagccaggatggtctcgatctgctgacctcgcagtctgcccgcctcggactcccaaagtgctgggattacaggcgtgagccactgcgcccagcctggcctgaaatgttttaaataccacttataatagcatcaaaatgtgatatttaggaaaaatttaattacaactgtatgataaaaactatgaatattgctgagaaatttaaaaagacctaagtaaatggaaagatgcaccttattcactgatgaaaaatttcagtgttgttaaaatgtcagttctctccaaaatgatttatggatttaaagcaatgccatatgaaactccagaaagttttttgtagaaactgacaagctaattctaaaatttatatggaattgcaaaggacctagaattggcaaaacaattttgaaaaagacagcagtgttggaggctttagggtatctgaaggatatcgtgtacatccatctgtaaagctacagtaacctagaaagtatggtattggttctcaatccaacagaacagagaattcagaaataaacccacacatgtatggtcaactgatttttgacaaaaatgacaatgttatccaatggttaatgggtagtcttttttaaaaatggttctcccagcctggccaacatggtgaaaccctgtctctacaaacaataaaaaaattagccaggcatggtggcacacccctataatcccagcactttgggaggctgaggtgggtggatcacctgaggtcaggagttcgagaccagcctggccaatatggcaaaaccccatctctactaaaaataaaaattagcagggtgtggtggcacacgcctgtaatcccagctactcaggaggctgaggcaggagaattgttgaactcgggaggcagaggttgcagtgagttgagattgcgccactgtactccagcctgggcaacagagcaagactctgtctcaaaaaaatttaaaaaatttaaaaaattaaaagcacaaatcataaaatttttaacattgataaattagacttcattaaaattaaaacttctgcgttgaaacacattgtaaaggaaaaaaagccacaaacggggagaaaatatgcccaatatgtttatatgacaaaagacctgcattcagtacacataaagaactcttgagaactacttagtaacaataatacaaactcaatttttaaaatgttttaaaaatagacaaaatatttgaacagacagttcatcaaagaagatataggaatggtataggaatggctaacaaacacatgagaagatgcccgacatcattagtcatcaagaaaatgcaggctgggcatggtggctcacacctgtaatctcagcactttgggaggccgaggcaggcggatcacaaggtcagcagatcaagaccatcctggctaatacggtgaaaccccgtctctactaaaaatacaaaaaattagcggggtgtggtggcgggcacctgtagtcccagctacttgggaggctgaggcaggagaatggcgtgaacccgggaggcggagcttgcagtgagccgagatggcaccattgcactccagcctgggcgacagagcaagactccgtctcaaaaaaaaaaaaaaaaaaaaatgcagattgaaaccataatgagattactattacacatccactaaaatgacaaaaattttgacagtaccaactattggtgaggatgtagagtaactggaacattgctgatgggagtgtaaaatggcacaaccacttcaaaaaaactattgccagtttcttatgaaattaaacatatatttactatacaactcagcaatttcattcctagatatttattcaaaaactaatgtccatacaagacttgtactctctctgtggcccaggctggagtgcagtggcatgatcactgctcactgcagcctggaactcctgggcctaagtgattctcccacttcagcctcccaagtagctgggacttcaggcatgcaccactgtgtccagctaatttaaaattttttttttagagatggggtctcactatattgcccaagctggtcatgaactcctgggctcaagtgatcctcctgccttggcctcccgaagtgctggggttatagacatgagccatcatgcctggcctgtatcagctttcttcataataaccccaaactcgaaacaactcaaatgtctatcaaaaaatgaatagatggaaatcagtggtatgcaacgaaatactattgagcaatgaacaggaattactgctacaatcagcaacatgaatctcaaattatgatgagtgaaaaaagccagactcaaaatggtgtagattataatgattctgtttatataaagctccagaaaagaccagtctaatctatagtgtcagaaagcagattggtggttgcctagggtaaggggtaaggtgattgattgtcaccatgcctggctaatttttgtatttttaggggagacagggtttcaccatgttgtccatgttggccaggctggtctcgaactcctgacctcaggtgatcctcccacctccacctgcccaaagtgctgggattacagacgtgagccacctcgccgagctgactcttactcctctctaagccccagttgagaagactgtagaagaggctgcccggaagcgggacggtgtcctgggcagaggtgaaaacagaagagaatttgccagtcatagaccaggagctccagagggcctgtggacgagctggggggactgtggtagggcagggaggaataggggattgaatggggttggagacatgcagagcagtgtgaggcatgagaggcagcatggtgctggctgaccacccaggcttggacttctcatggtgatggaggtaaagaaggaagggaggcaggggcaggctggtcggctggtctctggaatgagtgtgggctcgagtctcttcccttcctgatgctgccttcccttagtaacctggccttcctccacagtggctctcagatccccgctaatggggatgcccagagtctgtttcctgctcattctcttctcacctgttttctttattgcagtgaaatttggaagtgccgtgccttccccacacaccaggtgactgccttagcactaggtcacttgtatctcagcttgtttgtccactccccaaactcctggaggccaggaccacgtcaatttatctttgagtccattatattttaggccatgctatgctcaaggtacatggtctccgggcattgtttgataaaacagaataaattcaggagaggaaaggggaataaacatgcttagtgaacatcttctctgtaggcatatgcttgtcccttgaaaatcatgtgtatgatttcctgagcagagcactggcgctcagcggatattccagattattattattaagttatattattattattttattattccacctcattgggtaggcgttattacccctactctatgtattcatttcacaagtatttcttgagtgcctactctgtatcagacactgtgttacaccctgggaatactaagtatatatgagtgtgctggttcttcctggtggaaccgcaaatccccagatgcatttgctgtcctgcactgtgagtagaaaggacagtccctggggcttacatcaacctggctcacttgccagctgcttccaggtgtttttagccaatgggaggccctggcagggaatggcctgggagggaagttggaatgtttcttccttgttccctttgctttgggctgtgtttttggcagtaacaactgcagcctctttaggaccacccctccttcatggctccagctctccagggactttggtaacaccattctactactccctccactgtcatccagcacacacagagtgggagacaccatcctggtcatctcagggccctgagctgtggctaagtccacaggggcttcctgggcagtgacctgggtagaccagctgtttgtcgtcggctcctcccttgcttcatgctgttccctgcctggcacagcgcaactgccaatgctcagacagaagtgactagaggggatctcctggccttcagagtccagggcctgacacacagagcacagatttcactggaaagaaaagagaaagggaaggagggatggagaaggaagggagggaagatggaccttgtatctgagtccatcctgtgaatccattctccccaggtcactaagcctgaggttataaccaaacaggcttctgaaaggtcacggatcatgtaaagggagacctctgttgtagggaaaggccactgaacttgagaatcattcttgccaattctgtgatcttgggcaatacatttggccttagtttcctactctgcaaaatgagcacagctctcatgcttcaaagcagtgcacaaaagcacctcaaggttgccaagcacagtggcacacacttgtaatcccagcaactccagaggctgaagtgggaggattgcttgagcccaggagttcaaggccagcctgggtagcatagtgagaccctcatctcaaaaaaaaaaaaaaaaaaaaaggccgggtgcggtggctcacgcctgtaatcccaacactttgggaggctgaggcgggcggatcatgaggtcagaagatcaagaccatcctggctaacacggtgaaaccctgtctgtactaaaaatacaaaaaattagccaggcatggtggcgggcgcctgtagtcccagctactcgggaggctgaggcaggagaatggcctgaacccaggaggcagagcttgcagtgagccgagatcgcgccactgcactccagcctgggtgacaaagcgagactctgtctgaaaaaaaaaaaaaaatgaaaaaaaaaaagcacacctcaagctatgtaagtgctaggtgttgttataagcatatccaagctcatccccaggacaggatatcctcctcacacaggactcttttcttcttgcatcctcagaaatgtagtcatagccaggagtgataagacatttcattctaattggatgccacacaactaactctttttttccctttttttggagacagagtcttgctctgtcgcccaggctggagtgcagtcgtgtgatttcggctcactgcaacctccacctcccaggttcaagcaattctcgtgcctcagcctcccgagtagctgggattacaggcatgcaccaccccgcctggctaaattttttttttttattttcagtagagatggggttttactatgttggccaggctggtctcgaactcctgaccttaggtgatctgctcgccttggcctcccaaagtgctgggattacaggcttgagccactgtgcccagcctttctttccatttttttctcaccatttttttttcaaggtgacttacaactaattcaacatgaaaaaagagaggaaaggtcatgaaaatcataccccttcccctccccaggattttccaataggcgaaaattttcagctcctaaaagcccatgtggaaaaagaaaacagatgggctctgggaagtgttgcaaagccctgggaagggctctgagtcccctctgtcctctgaggtcaggtggaggggtcagggaaggagacaggtctgcagggacctgtagccagaagggatgaggcgggggctaggtgtggagcacccagtacatgagaggcactgtgtcagactctaaggaaacagaggggaagccagcactctggccctcaaggagctctcaggcttgccagaagcatttggatgggacagggcgggctgtggatggactcgagcctccaacccctcaccatacactgtggaagcaccccagttgtggcctgggaagggatcttgctagggtcaagtctcagctccggccagagtgaatgtctcctacatggggaggtggagtttctgttggtggatgaagaaccggaactgggcccaatttggtgactggtcagagggtactgaggtcctatgctccagggacttcccttccaagccgacctgggacaaaaagtaatgctccttttgtccgctaggaggagccagtgtccttgagtggactgtagggtggcccccacccccaccccaccccatctagggacagggagcattcagcaggtgggaagggagagcggtctgcaggtcacccagccttccctggagctcttcccctttgacctgggctccggctctctcctttgtcacacatggtggtggtgggcagtgggattccagctctatggaaatacagattgtgcgtaagtcaaaagcaaatctttacttcacctcgccaacccagagtgtgggcaaaccgggggggcagtttgggtaaagtcattctacccatctgagcctccatttctcatccgcaaaatgcaagctttgttaagccagatgttttctaaggcatcactatggggattttgaagtccagtgattcctagtgctgccccttcctctctaccctcagcctttcctgatttctgcaagtgcacaccaccagccagtcccataacagagcttcctgcccctacgttcacccccaatgcagggacattcctctggcaggtgtgagaggcagagtccctgggaaaccaggagacctctgccaagatccacactcttggcatcacctgggcctctcattccaggtcatgttttatttccaagcacagactgtgtttccaactcaaccagatctctccacccacacgtctctcgggtacctgcaccccaatgtgcccaaggcttagctgtccacccccactccaggctgctgtccatttcagcggtggcccagcaccctcccaatcccccaagcctgaagtctggctgtaaatatcaagccttctcttctcgcactttctctttccatattcatgtggccaaaaagtccagacaggcttaccttgaatgcgcccacctctcctctttcccgctgcccctgccctagttcaggccttcattgtttctttccggaaccggctggtctctctgactccagtctgtcctctctccaatctatcatctatctatgctgctgccagagagctctttctaaagcacaaatctgattatgcacatctctgctttaaaatcttggctgtagcctcgtggcctaaagataaatccaaagtcctaatgaggcttccaagtccattcatggtctgacccttgcttcccagtccaagctcatttcccagcatgctcctgggcccatccacaccacattgctccccaccctctgatctgcctgtgctctttcagggttcttgcctttgcaaacactgtcccctcagccaagaactacgaccctgatttttgcttggtgaacttggacttctccttgaagactgagctcaaggctgttcagcctttcccaagtgtcccaggcaaggtttccatcacccctcttatatttctttatcatctgtctgcctcctgcactagactgtagtcccctatttagctctgttcctccacatctaaccaatgcttgatgtgtggtagggatttcttacatgtgctgaatgaatgaatgaatgcgtatgcatgaatggtctgggaaatggcacgctcaattgcactcttccttttttctctgctggagcccactgagcaagggaaagggaaaatggtaggagatgagatgggggacatgggtggagaccagaccaagtagggctttgggaaccaaaaatatagaattgggatgatttctctcttattggatctcaggtacacagatttaatcaatcaatcatactcctcagaatgatatattgttgtcattgtcatctgactattttttggtccctctctcatacgcagtgagaatccataaacatttatcttatgtgaatccttccatcctccctacttttacttacaggagaatttgcgtttcattctcaaagcaatgagaactctttggaggcttttaagcaagggagtgacgtgatctgattttcattttataaggattgctctgtctgcaatcatagaggacaaaagtggagctgagggaccagatagaggctgctgaagtgcacgaatgaggaatggtgttcggtggaagagtggaggtagagagagagaaaaatgggcaggtgggcgtaggtactggaggaagagaagaccagactggctggtgtatgagatgtgggaatcaagagggggaaaggcctccacagtgaaggtttcagctgttctggagagtagtttagaggcagcctttggttggaaagggagccggggaacttgtctagaagctgggtctacatagcaagcatatctttcttacttagactatatttggggaggggcaataaagactatttatttggggcaaatgaagggatgcttagagagataatggaggaaggagggtttgtccctccaagccaatccctgccaccagcccccaacccccactttttttttctctgagacagaaaaaagcctcctcctcccaggtttgattctcctgcctcagactcccaagtaactgggattacaggtgggcaccaccatgcccaacttattttgtgtttttagtagagatggggtttcaccatgttgtccaggctgctcttgaactcctgaccttaagtgatccacccgccttggcctcccaaagtgctgagattacaggcatgagccactgcccccagaccaagccaatccttaacaccaccacaggccacagggcctttgcataggaggctctcttcccgaatctgtgcaaaccaactcctctttccatcaaggtctcagctcaaagatcatctcagaaaagctcaaagattatctctggcatcctggctggagagatgacactacctcctgcccctcaccatcaccctctacactctctttcactttcttatagcacttatcaaagctttgacgcagttctctggtgcagccaccttctagagcttttggtgcacttctgaggctcccctccacctcttctgtttcgaggaccttggtgggctttgatggagacagaaccaagaacccagcgccaaggtccaggcctttgtgaggtgctggtgcaggggtcgcacacccagctgccaatcaagtgaagggagggaggaaaatgaacatctaagacctcaagctggaagaagtctcagtcccagaaggtggtaactggttcccctgcccctcttcctaccccctcccacagctcggccagctgctggagggacgctgcaggggaaggaggcagggtgattaagagctctggttgtcagggctggggccagggggcacgccccctgggtgacattttctcgcattgtgtcctcagaacaaaaacgagtcttatttgaggagctggatgggggagggggccggggggctgaagcgaccgagtggaatcgtggctccagggaacagcgattactcatcaaaggccagggcagcccacgtctttgtgtgccctccgcagcccgcccgtgcctggccacaggcccccagccctagacatccccctgacggcccccaaagagcagggctggggtgggagagacctgggatcgtgtgtgggcacagagccgggacaggcgcggtgggggcaggggtgaccagggcaggcttcctggaggatgggagtgtggaaatgcacaggacagaggggaggcgcaagaaggagaacggctgcaggctaagggggaaaaaaagtgggtctccggagaccagggggtgagtgcagggggacggggagggggcagaacttctaaggtgtcaactcagcccccggatggagtgtcctggagtgcttgggggaaggggccgcttcctgctacaatggctattttggggcctgaatcaaatcaaatccgctgcagcccccagagcccccagcagctgcgcagaacagctgtccggctgagggcgctgagcggctggaatggcacttcctgccccccactgatctctggctgcccaagggtgtgcgttgcaggggaagggggaagaggatgtgaaagggctttgggctcaagtcagaaacctgggctaagatggtgtgctttcctcctcctgctctgtgtgaccgcggggctgagactggcatagagatgccagttctggggccatcctgaagctcttccctgcaccttcaccctccattcagtccctacaaggtatctccccaggcccagacaatccctacctgagcagtcctcctgatcttccccccaggaagcccttctagtttctcttgatgggaagagccctttcctcatctgccgcctcccaacctcaaaggctgttcccagactggttccctgcaggcagaggagcatctctcccatcagatctggatttggttcttcctctagctgaactcccagccatccacttggtatttactcacaaggcacctgagggttgacacggaagacaggtaagcttcccggcaggtgcctgttcaatctcctgattgtgctgaaggggcctcatgcatgccagctaaaaacccataggctggcatgtaatagagttggggggagcactgaactgcctcctccaggaagccttcctgggacaggcaaaaaggagaggtctctttctttttggtccaccctggctcaaggccagccaatgtccacaagagtgaccaaagctaggacatgccctggggctgccatgtccctcaggtcactagtccatgacggggtccctcgtgcccatcttgtgcagaaagaaccccattgtccagggggcatagctgaggggtgagttcagagcccagagatgttgaccacagggctggtcatcagtcttctgaccacagcaggagggagttggggaactgtgtggtctgtgggggtgaggggcaggcacacactagtgcacacacaggaccataagcccagacactgccctcctcatccaagcacacactcccccgtgctccccccaggacggcccctccctttgtttttccgcattcctgctggcagatgctccattcttttcttccccaagcaagccagggagatctccaccttccggggtgggggggctccggacatagcaaaagtggggggaagcagggatgtgccacctgtccctgggggcaggggcagcccctggagccccacccacactgggatgagagcccagggtgctttgatctcctgtgcggtgcgcctgttgtggaagctgccaagattaacagagatgcacacacaggtcttttagccaggtctgcaattcctgagcttgtttccagatcagagccctcatcttccttcagagacctcttcactaatggacctcccacctctttcctcactgaatctctcccctcattgaaccccctctcctctcccatccctatctctatgagtcatcccatctctgggagattggtgtcctttccttccaatttccatgggccccagaaggtctggtctacaacacagaccccgtaggtagtggctgagacaggttgcactggtttgcttgtgcccaaccccctaaagacacacagtgcacctgtcatcaccaccaccaccaccaccaccacccctgtgcaggcccagcctgagaaggcccatctggactcaggaagtcctgccatttcagcaggttgaggttcctgggcccccaggctccaagtagaccagagactggtaagaagtgaatggcaggtggagactagtaaccagactctgagttgaacttgattttggccctgaatccatctgaggtagagtcctatgatctagccttcttcttcttcttctttttttgagacagagtctcactctgtcgcccaggttggagtgcagtggcacaatctcggctcactgcaacctccgccccagggttctagcaattctctgacctcagccacccaagtagctgggattacacgtgcctgccaccacgcccggctactttttttgtatttgtagtagaaacagggtttcgccatgttggccaggttggtctcaaactcttgacctcaggtgatccacctgccttggcctcccaaagtgctgggattacaggtgtgagccactgcgcccggctgatctagccttcttgtaggatcattcacacatatcactgtttccctcataagcatcccaaagcgggaggaggcccattcccccttccactctctcccagcccaggaacagctcgctccagagtggcctggctctgatgatcaggaactcattgtatctgtacagtctcaattctgcctgcggtgaaggagaccccaccctaagtgaaagcagggactgtggggtccacgtgggattcagggagggtgggagagtgagacccaaagagagccagagataaagacagaaagccagagaggtaagcaatggagaggcagagaagatggatggatggatggagggatggaggattggagggagggagaaaaagagaaaagcggagggaagagaggaaggtggagggggaggggaggggagggagagaggggagacatagtgaagaagtgctgagccaagatgagaggaaggaagctattggcccctctccctccctccctgcagccacaccaggcaaaactccagacacaaatgcatctcaatgggcgtctggcagggaggctccaactgctctgaggttctgaggttccgctgagctcacctggccaagtgtgtcaaaactcccaccagcatcaccccagcaccacctagaagcactctgagccccactctgaagataattctgggaatgaaaaagaagtcgaaacctgcccaagtcctccgagagggtctcgggtccttccccagtcccttgcattgctggaaaccctttcccctagaacagagctacactaactgccaggaggccaggcctgttggcagaaacagagatgaccccctctcccaccttccgctttgccactccagtgactatttgctgactgtctctttcttgctgctaatcgctcggccccgtctaattggtaattagccttgcgagcccagcctgtgcttggctaattgctgtttgtctcaccctcatctccggcagcagagtggtgccaacacagccgcctgggctctatccgggctgctggcatccgtgccaggttctgtagaggtttctgcagccccaccctgttctcttccagggattttgtggggtacagcctccttcagcagtaatgtcagccctgagggtggtccctgacagtccttctgggtggttgcagactggggcccctgctttcatgcatagtccatgcccagttatagaaaaagacggccatgagtgagctacagtccctactgaggagtggagtctggggggactctagggaggaggtgtctgcaccggaacttaaggatgtctaggatttaaccatcagagaaaggagaaaggacttttcaggcaaaagtggtggttggcccagtgtgaccgaagggtctggaaaggagcctggaaaggtaggtagggtggggtttgattctgcaagctgtaggaaccatggaaggtttttgagctggggaaaggtatgatctgctctgccctggggggatcattctggatgccgtggtgaggatgaggattggtgaggggaaaaaccaggccagggtgaaccctcaggaggctgctgcttttgggttggaggcagagaggagggcaagggtgggagaattgttttagaagaacccacaggatctgttgatggattggaagcaggaggacatccccagggacggtgtgccaaggctgtgatgatagacttccaaggacaacaaggatcctcccctccccactagccctgttgggagaagggcaggtggcatctcacctgttttccatgactcatagtgtagcttgggacccctttttgagaactaagtctcctggtctctttaggagcctcttaaggagatgatgtcattgactcaagaactgacactggctgggcccttaccatgggctggtaaccaagcaccagcttctcagaacttcccaggagaaagccactattattatcttcaattttcacatggggaaaccgagacttggggagattaagccacctgcccaaggccacacagctagtaaatggtggaggttagatgcgctcaggtctcacttctccgtcagaactctaaacatgactttgcagtacctctcaacctcctgtgacaactgtgctcggctagggtttgttttattgactgatttattttaatcaaaatggcacccaccagctcgtcccctctacctgaaatccctttccttttcaactctgtccaaatccaacctatccttttaaacccagggcaaagcctacctccttcaggaagcaatcctggattttataagcccctctctacatgctggaggtaacctcttggacatacttgattttgagtctcgtagcagcactttctctactctttgccctctcccagggcctcctatagagggaagacccaccctgcaggaggccacacgtgtgttgaccacattgccctagactgccccgggatgggtcttgtcctcactgaacagcaaatgtcctgaatcccctggtcatctttgggtcacgcccactgccacctcacctggcactgcacacagggtaatgtctgccccatggctatgttctgagcgatacttacttgtccaactggaggaggctcctctcacttgtcatgctggactcaagtggctcctggctgtccccaaaactcaggttcactcatcatggcagggagctttggctctgtccaggatcgccagaagcctgagctgctagctcaaagattggcccacagcaggaatttcccaaagtgttgggggcctcatggaatgattactttgaaatggactacacgcggttagatgagtaagtctttgtgcttttatcaaaaccatcagtgacatcttgtattttcctttcagagcctttatttcctccagcagtgctggcctcatgccccagaataaaaacgcactagtactttccatccggcctggaaggggctttagtggaagctggtggagctgcagtaaaggggcgggtgggcagagaggggtgggtgggcattgtcctttgcctccaagccagccccaaactaaagcaatctaggaaccagaggttggagaccccactaaggaaggaacctgggagaagatttagcacacgattttcagctgtgtttgggagacttgtgggatctttacaggtgcctcggggttgttgaagggcgaaagacgggcattactattattatttcgagatagggtcttgctctgttgcccaggctggagtgccgtggtgcaaacatgactcactgcaacctcaacctcctggccttaagtgatcctcccacctcagcttccctgagtagctgagaccacagcacgcaccaccacacctggctctttttaaaaatttttgtagagatggggtcttgccacattgcccaggctggccttaaattcttgggctcggccgggtgcagtgcctcacgcctgtaatcccagcactttcggaggccaaggtgggcggatcacaaggtcaggagatgagaccatcctggctaacacggtgaaaccccgtctctactaaaaatacaaaaaattagccaggcgcagtgacacgcacctgtagtcccagctacttgagaggcatgaacctgggaggcagaggttgcagtgagccgagatcgcaccactgcactccaacctgggtgacagagcgagaatccgtctaaaaaaaaaaaaaaaaaaaaattcctgggctcaagccatccccccacctcagcgtcccacagtgctgggattacaggcatgaaccactgcacccggctaaggtgggcattatttatctttgtgttccccatgagtattctgccattcctggtttgcatagtcattggagacatgggctctgcaatgaatcttcttggattcaacccggaagctctgtcccttactgcatgtgtaactgtaggcagcttactgaatgtccttgtgtctcattttcccatctgcaatatccagaggatgataattatcatgctgtttcaaggtgggttgtgatggttgtgaaatccatggtaccatgcctggtcttcagcaggacttaacaaaaaatagcctatattattttacctatatgtttttgggtttttttccccttctctagcctatctgccagattcacgaacaacctgacccaatgcaggcaaatgcagaggatgtcccataactgtcccacttcctgggaacccttctttgtggccagacagggtttagtgcagagagacagagaagagccaggtgtcccctggcccaatgcttccgggaagcgtcttggccttcccacctctgagaacattcaggcctttgagatgtggcccctgcctgccccagtacccccggcccgacaatgggggcttcagaggagcctggatggcaggacacagccccctctgtgaagcggagttgaccgccaagctggtgagtctgagaagacattcctcatggggcagagaaggatgaagggaggaggctgtgcattggccccttggcccagccctgacccgaggagccattgccactggggcttggacaaaggtcccctcttcctgctctctgtcctttcagtgcccacccgggggatggtgccaacaagggtctgtcccagggccaagaaggaaggcatgaggcttggatgatgtgaggggtctcctccaggttataacacagcacccacagtgctgcggggtgagtggagaggcgggcaggcagcaagccaggaaagagcatctgttggagcttgtggtggccacaggctcagggacccttgcctccttccctgcgccctcagtcctcagccctctgagccatctcttgaataatatctccagcaatctcaaaattctcctctccccttcaggaggtcttcgtggatttatcagggagaagcatggctgactaaaggaattctggcaccacgtgacaaccatcttcctcatcaagattggtgtcctgggaagtggctatccctgaccttccggcagaatgaggagaaaagtctgaaccaggcagtttaccttcccccggtagcactcctctcaggccatggagaataacaatagctaacattaactgagcttttgctaggggccagaactttgcgtgcattatctcatttaatccttgtactaagaggtaagtaccattactattgccaaaagaggaaacagaagcttagtatggttaagtgatttgctcaatggctggaagagatgaagtaacccacctcaaggttgttcaggtagtttgcagtagagtcaggatttgaacccaagcagtctaaatcccgagattcatttcaccaaaaacagaaaccagagaatagaatcctgatccctgcagcaggtcagctgagccaggaccaattcattgcttgattcctacaaaggattcttgctgatgaaggtaacaaggaagatagaaagaggagattgataacagtgaggaagaacatgttgatgaataggtgactaggaaattcctacctaggaatcattgagttgttcattcattaatccgtcatccatctcgggaactctgttgagtggccatagagtgtaaataacatgagctctggagcctgacagactgagttcaaatcccagttctgccatgatttcctgtgtgaccttgggcacgttgcttcacttctctgagcctcagacgtctcatcaataaagtgaggataataaattatctatcttgtagggctgctgtgagaatacatgttataatacataggaagtggtttgtatgttgcctagtacagaatgaacactcaatgaacgttagctattattattattattacttctacttctgtccaggtgctgggctaaggtaccagagttacaaagatgaatgggactgcctctctgattgaagagattagtggaagagatagagatagacagacacaatgtaataggtgccgggagtggggcctgtacaaacaaccatgggaacacttgctgtgcctgaaggactaaggagggtgttccagaggaggtgaccttatctgagacttgaaggataaataggaacctattaaacagataggaaaagaagagataaagccggctgggggcagtggctcacgcctgtaatcccagcactttgggaggccaaggtgggcagatcatgaggtcagaagttcgagaccagcctggccaacatagtgaaaccctgtctctactaaaaatacaaaaattagctgggagtggtggcaggagcctgtagtcccagctacttgggaggctgaggcaggagaatcgcttgaactcgggagtcagaggttgcagtgagccaagatcgtgacactgtactccagcccaggtgacacagcgagactctgtctcaaaaaaaaaaaaaaagagagataaagccattccagctaagggaacaacgaatgcaaaatgctctagtgtgaaggaagcatccttaagggagcagtatggattttggcagccaggaggtgctgggtctggttctagtgttgggtgttgggtggggatagtggcaggagtaaggctctgtaccttggcggggcctccatgctcttctaaggactctgcattttgtcttatagacagtcgggaagcgttttgggtaaaggcaaagtgtgaattacacgtaagacactctcagctaaccgaaacttgagaatttagattggctccatctgggcctgggagaaatggacccagccatcccccacaggatataaatcccaagaaaccacaatcttgtcctaagaagaaagcggagacaggcagggtgagcaccagggcccttcactgctccagcctgaccaaaacccttggagacacagatctggagtcttgcccgtgacagtgtgaggctctacagcagtgattctcaaacttcagcctgcactggaatcccctggggaccttgttaaaaggaagattctgattcagcaggctgggatggggcctaggaatgtgcatttccaacaagccaagccctgccttccccaccatgccgatgccgctgatccaggaaccacactttgagtggtaaggatctagaaccatggtctgccatcctggcagtgcattcaagtagcctaggggaggttttaaaaagaaaaagaaagatgccagggcctcaccccagaccaattaaatcagaatctttaggggtggggcctgggcatccatagctttgaaagctcccaagtgactctgatgcatgggcaggaagtgaaaggagaacactgcagaatgtgctcgttcaggctggggcagggggctcagaactcccttcccagcggatgatctagaaatagcatgcagtgcacacaaagtcctagcccatgccctgtgaacagcattcctggtaaccccaggagggcaaccaaggggtatccatatcaggaagggaaaggggcaggaagggcagcctcctctcaactctgtccccaccagcctcttggaagtggctttgtccagtgtctgagctaccaggctaaatatagcccgggctgggggctgaattcatgctattgaagcctctcgattgccccagccccagcctcagaatgcagagagaggctagggaaggggaggctgggagagaagggagaaggggtgaggaggtggggaagagacaggaggtagttcgcttggccagttggaatgggaaatctgaacaagtttatcttttaaagcgagggtgcaatgtcgggggaaaagagagagacattccttacctagtgctgaactatgtcccctcaaaatttatgttaaagtcctaacccacagtgggactgtatttggagacggggtctttaaggaggtcattaaagttacatgaggtcattagggtgggaccccgatgccacaggattagtgtctttataagaggaaaagacactagaacattctctcccagcaccccccagctcttcttgccctcacatcccccttctccctgcccccttccacctcttagcaacatgtaccaaggaagggccttgtggggacatagcaagaaggcagccaggaagggagccctcaccagagactgaatgggctggaaccttggtcttggacttccaacttccagaactgtgagaaaatctatttctggtttttgttattgttgtttgttgctttttttttttttttttttgagacggagtctcactctgccacccaggctggagtgcagtggcgcaatcttggctcactgcaacctccacctcctgagttcaagagattctcctgcctcagcctgccgagtagctgggattacaggcatgtgccaccacgcccggctaatttttatatttttagtagagacaggattttggcatgttgcccaggctagtctcgaactcttgacttcaggtgatctgcccacctcggcctcccaaagtactgggattacaggtgcgagccaccgtgctgggcccaatttctgttgtttaagccacccagtcagtgatgttttggtacagcagcctgagccaagacaacttgtaagcagaatctgcccatcccttacccttttatccatgtctcccagagccaatgccccttccagaaacttcttcaaaggggagatcctgtgatggtttgttttatgtgtcaacttgactgggtcacagggtgcccagatatttaaacattattcttggtgtatccgtgagggtgtttctgggtgacattgacatttgtgtcatgtctgtagactgattaaagcagattgctgtccccagtattggtgggccccatgcagtccatcagagacccggatgaaacaaacatggataaggaagaagtcactcttctacgtgaatgcttgaactaggacattggtcctcctgtcctttgattggaacctacaccaccagtgctcctggttaaggcctttgggcttggactggaactataccaccaacctgctttggcctccagtttgtagacagcagatcatgggaattctcatccttcataatcacgtgagccaatttcttagaataaaatctctgtattatgtgtgagtgtgtgtgtgtttatatcgatctctatttccttccttccttcctttctccttccctccttcttttccttccttcctttctccttcccttccttccttccttcctctctctctttctttcttctgttggttctgtttctctgaagaacacgtgctaatgcaccttcacttccctaagtgttgctcatcctagtctcccacccagtgcccgtgaggaagttcttgcaacctaatcaccatccctacagctgcaactagacatgtgcatgagaagaatggtgcccgaacccccaacctagaaaaacacatctcttaagagaggcatgggatggagacaggggacacagcagagaatgggccagcctcacccttggcctcttgcacacccacccctctcatacaatgtcactcaggcagacaggtaccccaggagcacacacagcatcacctacagacacccagcatccctggcacacagcgtgctgtggcaccaaacccacccccaggaaggcaggctctgtggctggtccccacccagcctgctgagtgtttaagtggtgagtttgcacagcagcaaggccagaggcacattaaggattcacttcctggctgcagccagcctagctcagccttcctgttagaggattctgtgggcagcctccatccagagacacagctctgcaaaaccacaggcccccctcccaggcctgtgcccccacccacccagcaagccccctctggtgcccaggcaggagctcttcctgcacctcttgccaaggcccttccagacgtcttcgagcagcaggccagagcctcgaggggtttcaggctggggggaggtgtagcagagctgtctcactctgctgtctcagcttccacccagcactgatggttaacaagtctgaaggcctaattggtttgattaccttatggtgggggcggggggtgcggcagaccctaccctatgcagttctcagtccaaatttggtggtttggggggaaaagcctcatgacttccagagcccccaccctggggaagcagtccctaccccttaggggccctaagctgatgcaggagacacagcccctgccctcagaaccctgatctgatgaggaaatgtggacgccctggagacgggtgaaatgaagacagagagggttggctgggctgggacaggtgcagcgggggcttgggcaggagatgccagggagaagagggcgtggtgacagggccagagctggcatcactgcaggtttctctgaggagttaccaggagagcccccaagggcccccaagggcaggtgctgtgtcttgcgcctcacagaaagtaggggccctctgccttccttgctccatgtcctaccgcagggccggggccccgggaactcacaggcggctcctcccctagctgcccctaactgaccgaggggcttccaggctgcctcagggcccagaccagtccagcctgtctccaagcagtggcccctttgactgggctctgggtgttgcacccatcacctcacttctgctcctctcatgtttgccccacagcctcaagtaaaccagaaaatcagcctggggtggggggtgagaggtgggtagtcagtgtgctgaggggaggggagccattagggagccgagctgctgtaggactaggaggattctaatcgatgggctcatgttatatttatcagccacagtacttaggtgctgccctaagcaggactaatgggctccccattggagacgccattacaggaagtgtgttggggggaggggtgctgagaggagatgggcacctggcagggtctgcttctcctggcaactcctcacacccccagtccctcacacaggggcctcggtcctgcaggctgtggggattggatgagactgccatggagtgtgcaccatcctcttcccctcttccccacgatctgactgggagaagtcgcccagagaccttaaccagaaagtcacacccgtcacccctgcccttcctgcttcccctgactgaagccacaccctctccaccctccactgtccgatgacagcaatgtaggccaaccaagtggctcagcctttcctggggtggagccagtagcagttgccatggtgatctttcagggtggtgggtggagggggggtctggattcttcctgtaagagccttaattgctcatttatttagggcaattagtccctggcgaccctcccttccttgaccctggcaatggctattctcagctcacaaaacattccaccaagatgggatatgggggctggtccagaatgaatggggtgggaggggaggaggcagggtgttgggacagaagctcccaaagtctgagaatccacatttagaggctgacctggtcacaccgctccatgtcctgtcactggcccctgctcccagcatcctcttggcctctctggcctctcattcagccctgggggtggacccgcccctccacactcccaaccttggtggcctcaggacagctgtactccctacccatagcactactgtcctccctggccagcccccagtcatggttggctcccgccatagctctgtctctcctcctcataggcagctgctccaagagccgcagctctcagggtagcccttcctgtcctgccaggtcccaccttgtcccagcaggcggccataggataccctcatcctgagtccctgctctgcactccagcacactgctgcccccagcatcttagtccagactactagaactgtgcctctggaaggctctcactgcacagatggaggaaactgaggcccagggaaaggaagctagtccagggttcctccatgagtccgaggcagagccaggactagaactcggagcccttgcttccctgtctagtgctcatggcaccacagtgacctctccttttttagaccgcccctgccaatggcccgtctctgttgtctctgtcttcggcccatcctgatgacggagcctcctggaagcccgtccatcgcagctcctcagcgatgctctggctcagactctggtcctctggctcctccaggccacagacgcctttcccctgccttctgcctccccgactgtgctgtcctctgggctctgaactctccgtctctcagggagcccttcatctccctgggggaggggcccctgggacaggggaatcctgtttaaggcccttcccgtggcaatacctggggaacttccagttcatccacatcacccaagggcctcttggtctaaagctgatgcaagcaatgggggcctcggggctcagacacctttgtttttgtttttttcccccttttgggtttagaaccttttttgttgttgttgtttgagacaacaacaaacagggggtctcactctgtcgcccaggctgcaatgcagtggtgctggctctgctcccagcatcctcttggcctctctggccagtgaccgaggctcactgcagccttggtccctcagactcaagcgatcctcccaccttggcctcccaaagtgctgggattacaggcatgtgccactgtgcccagcctggaaccttttttgtagggcaagacacatgagtggctggagctccttgtgaagaaggatcaccctctaaaccggcgacttagccagctccccttccttctcctctctacccatctcatactttcttcacctccaccagtgcctgccgcaccagtctccttcccttcaagtgttccttcctgtggccctggaaaatcccttcatggggacagtgagggatggggtagtgctcaggggtttggggacagaggatcaggggaggctgcctggactcagccttggtgtctccttggctctgggacaaagagagccatgtcgggagtgacctcaccctttgggcatcctctgttggacaaaaggccaattgttccccagactggaagcaggaggcggaggatgacactccagtccttggaccctctttggagccccggcactcttgcccagagcggctcagcatggggtgggcaggccagcacagtgagccaggcctgacccaatttggatggcaagagaaaggcttgaaatacctgttaagaagtccctcctagggtctaacctcaatctggggacgtgaaggctcactgctctgaagctagaggtagatactctgctttctgctcttccatttttccagctttggcctccatttgcggggaagcttttcttttatttcctgagagagcagtagttttcaatttttttttcaaaagtattgagacccttcaaataaaatcttcctagaagcccggtcagtaaagcagatgaaggtggaactactttggctgaggtggtggggatggtggggtagagggcagagacctcctcaagcccctttcctcgtcccttatcttgccccatttgagctcttagtttagattttcttctggggtaattaagcttcaattctctttgcccccctgctccatcctcctatatcgccttgtccatagaggttccatactcttacatctccctgaaaatgaacttcacctcccactacacacacatccttttctcatccatgtccgtctatactttcataatcctccttctccaggaagtcctccctgacctctactttatgtcactccccctggcctcagttcatagctccctaagctgacttctgtcaaggccctccttatgtggggcctccttaaggctctcccttctcttagaagctccttgaggagagagaccttgtcttttcatcccagaatccctgcttcctggctcacagcagggccttgtggaagggaagacatgaatggcccagagggaagcactcagtttggggttgggtgaggccttgtgtgtgcttggccgggcaaacactctagactgtcaaagttgtgcccacccccacacatccagacagcccagcgcagacactttacctccccctcaagagccaccaccctctctcaactgcaagcccccatatgggggggaatggggcatgggggggatggaggagaggactgccctccagatgttgttggaaatccaacacgtcccctccaccctccctctcccacttcccgctccatttcccctaaatatttaccgatttttatttacattctttgcctgaggtgcccggcccctgtcaggtcccatttgcatgcccttgttccctcctgccagctcccctcctcatccctcaaatccgaagccaggagttgtgtgtggttgggtgttgggggtggtgaaacctgcgggctggtagctctgggaagggctgggcaggggggtgcggggaggggtaggtcagcaacagggccagcttgcctgtagactcccccctgcccccaatctgggatcgctttagccacccccctttgtttcacagggacttctggaagggactgatggattccagatgccaggagcaccgtcacccagggatgactctgagggtggggaggagggagagctgggacagacataacaggggctgagacaattctgttcctggcatgttgggtggctacttgggagctgcccacccactctgggcctctgttctcccactgaccaaggagcctggaaacatgattttccactccattcccaggctcccagccccacttccgcctctacccctcttagctattgaaccaatttttgttgaacacctactatgtgtcaggacctgtctcttgtgctgacacgtcaacaaaacaacagaccattattcttgccctgcggagcttgctttctcgtgggagagagtaaataaatcatgggggatgttagaaagttataagttccgtgactaggggaaaaaagcaaggtgaaggaagtcaggagggccaagaatggggctagggaagtgttgcagttttacataacaacgtcagaaggcaagacttgagcagagctttgcaggaagggagagagtgagagtggagctgggtagggaaggaggttccagacagaggaacagcctaagaagcatgcgatgcgatgcagactgggaagaaggccaacatggcctcagcagtgggagtggcagtgaggggcataggagaggagagcagggaggatggtttgtggtttttctgagtgggatgagagcctctgcacggttctgagcagagagtgacacaaccagacctgttaatacaacagggtgattcctgcctcccttgcaatgccccctccactctggtcacgctgcctttccttattttgctgtctcctgcttctcagctattaccctgggatgtggtcctctctccctatgattctctgcctgtactatctccctcccaggtagcctgtggcttctataaagctcatctcctcctggaagccctccaggattgctcagaggagtctgactggctctgcctggacagtagatgtctttttccttctcccttcccatgggagggatgctaaaaagggagatggtgatgcctccctggggccactcaagaaccaagggagggtgagtcattttctagaggtgcctccccaaatagccaatatcctgcctctcatgagcctttctactgagtttttcatggacacttctgtcttccctttccttcctcttcatccttctccttcccaccagagacaccttccctccaccctgtaagcatgtaagcaagggactgaagcctcccacttctcttctctggggtgtgcctggggaggaccatctcaaaagtaaagaggtagcaagcgctaggctcccaaaacccaaagaccagacccctgcgagagtacagcagcagtgggactgtggcgggattcactgctctaactggcaccctcctccacaccctccacatccagtctctgtggggctgcttgctatggggcaaactctgttttcaaatagtgaccaattgctggcccaagcacagagctggtggcattctcttccagtagggcacaaactgtggcttccccagctagcctcgggcacttaaccatcttcccttcccgggttgccgagggctctgagctcctggtcctgccttggtaaataaccgtcttcccgccctggggagccaagggctctgagctcctggtcctggcttggttaaggctttgctcactcattcaggccccactcaaacaactatttattgagcacctactatgtggcaggcactgggctaggctggctcttgccctcatggagcctgcagtgtaatggggagcagacatcaatcaaatagccacccaaatgcagtcaggatgacagctgtggtcagtgccaagaaaacgaagaacatgatgccctaagagtatgtacaggggatttgaccggccagggaagctgggggccttccccaacaaggtgatgtctgagttgaaacctgaggggatggaagaacagcccaggcagaggaaacagtatgtgcaaaagtcctgtggcaggagggagcatatacaatgtgctgggagaaggcagacaaggccggagtgcagagagaggagtgagaggtggatggagactgacaacgcgagggcttctaggtcatgtttaaacccttgatccaagaacagaggaagcctctttgcattttggagttgtgttgggtgtggagggggtgatatgatcatctcaagttggctgcagatcgggggtaatgagagcggaggtggaggtgggaatcctgttaggaggtagtggcagtggtccaggagagagctgatgctggctggaactagcagttggcaggggattagataagggtggtgtcaagaatgacggctggattcctgcctgcagcgtttctcacctgtaaagaggaaagaaacagctcgactttctcctggtgacaaatgaattaacggagacaaaaattatctcaggcaggcattggtgtgagctgtgagagtagcgcagcttgctctccccaggcaggtagttgtatcttggttctaccccacatccttcaggctacccatacccatacagaacctgatgataaaaccttgtactgaaaaccgcagtgagcgtgatttagattagactgctgccaacagggctggaggaagctgttggtggaactagggccaggggatgaaagagcagacagaatccaggtggagggccacgtgcctggagcacaggagaaaagctgtaaacacctcacagaacagttcaggatctggtgaagctggcagtggcctgggaattaagaaagcccaggtggagggagcttcaaaggaaattccatactctgtacctgcaaaggtgatgctcttcaaaaacctcaacctgggccgggtgcagcggctcatgcctataaacccagcactttgggaggccaaggcgggcgaatcacgacttcaggagttcgagaccagcctggccaatgtgttgaaaccacgtctctactaaaaaaaaacatacaaaaattagctgggcatggtctcgcgcgcccgtagtcccagctactccggaggctgaggcaggagaatcacttgaacccgggaactggaggttgcagtgagccaagattgcgccactgcactccagcctgggtgacagagtgagactccgtctgaaaaaaaaaaaaaaaaaaaaaaagaacctccacttcttgctgatggaggaaatagagcatgcccagaacacagggagatggagtggccaggatgcagggtataggcacaagagctgggcaggcacacagggaacacacctgtgggggtggagatgacttgaggggccttcctagaggagaaggaagaggtggagagaaggaggagatactcagatggatttggggaatgctggatatgtcagtcttctctggctcagctggggtttgctcatttaagctgacagtgagttggatgttgagtgatattgacaccccacccccacccccaattcagcacctccctccaggatcccacgttgctgtcagtttccaggcctttagtaaaatgatggtgggctcatcattcagccccttcattaccctttcctcctctcccgctccagtttataactccacccactttggaagatctgcatgctctgctccctgctcccacctgctcctccctggccaaggcccagagtagcccccatagtgagcacccacttggctgggagctcagggtctactgtgcctctggttcacatgttggcatttgaggagggcctgagtcatcttggtcttccctgagcattgctctacccgaaaagaggcccctggcggtagggggaccaaccttcgccttaggtgttgaagtcaagtgcaggaaggatttcctgggctacaaagggtgacagctgagggtgtggaattcgaggaatcaacttatgtgctccatgttgtgtggaaagtccatagctgagggcttggctgggggagggtattgcctcagagaggaacagggaccacagcaatagacgggcaaacaaatggctgtcagcaccacccacacagccagacggaacatttgcatctcactgtgaacacagcgcctggcccagagtgctcctccagtgaatgcctatggagagaagagagattttgcttcccagttcaattttcctcttgatcttcctgatcctctagttccttgtctaccaaatggggtggtaatctctacttcctatcttgtcagattgtcatgaagaacaaactaaccaatgatggcaaaagtgctttgtaaacactttgtaaactctgtatgaaaacatacaggaggaccgagcccagcacagtgcctggcccacagaggctgctcagtattgaataaatgaacgaattacctaatccctacaagaaggtatgctccccacaggcacagacccagcctgtttctcctcagcactgtttccccagttcctagcatggggaaggtgcctgacaagtatttgcatggagtgaatgaatgaatggtgagacttaatcctatcttcggggatcttcgagaactttggaggtggtgaggctgataccccagggcaacaaaccacgctggctcaataaccctgaaggcagctattatttccccatttacagatgaagaaacaggcttagagagattgagtgacttacccaaggccccacagcacctagtcagtgatggatcaggatgggaatcccggactcggcctccgatgcccatgctttttctaccacagaaggctcctgctgctggggatccggtggagcactggcctccgtgaccatcccctggacaagctggaatgttcttttgtggtgggaggatatgtcataactgcacagcatctcagcgactctgcagcaggaggctgctgggttcattaagaggccaagattcactcaggatgtgccaggtctagaaacacacacgtgcccaggacatctgtgtctagatgaagagactgaaggcagagaggagagctgctgatggactttcctgacccacaagtctctgtcatgtctgcacacagccagcaccttcccttttgcaccctgagccatctcagtctcccacagaccatgttcccttgggcagggactcatcacacaaccgctgcccttcccctccccgactgaacttcaggctctaccatgcagctcactgcttcccaaagtatgttctgtgggactatgtcttgggctgtttgtagacattgcttgcaaaaagattgcctgtgatggaaaaagcttcggaaaactgtatcaaatatgctaacctggctgcatgctaaccttgcaggacttctcagatccctgattatgctcatagggcatgtgaatctccaagggctggggagcttcagtaaagagcattttctacatttattttggccctaagctgtttcttcaggagcatctcttgggactgttgtgccccagggcactcttgggaagtcattgctgtagctgtggagagtccctgaggcatttcagcagagtcagaggatccgatcagtcagtgtcttaggaagactgtagggtggactggaggagccaagatgggaggcagagagggtacttaggaggctgcatcaacagtctgcaaaagaggaaaagagccctcctgccagccgggcaccatgctaaactggggtgtctgtcttcagtgagcttgcagttgaagcaggtgggctgagcgcccaccaggagctctcctccaaggcagaagatgctaagtgctgcaaatggagccgcatcgtcaatccaagaagactcttgataacttattcaactggcactccgtggctttggccagcttcctttcattttccttttcaggaatcaataaataatttgaagttgtcaggtggtacttcgttgttgtttttataaccctcattgatagggttgatggtctcagtgttcattcccaaaagtcacgtgaggtcagtctactgcctcactggggcattgcaactgaatggggagacttggctctaaggctttaaagtggtaaatgcccagtttatttttagtctattgtgttgtcacaggttcagttccatggcactgaggacagtttaggttcagccagccctagggtataggtaggacttaataacatctgcatcctctcctgcccccagcctctgcccctatcttgcactcactctgcagctccatttcatgggataatgtaatgggctaattccgcaccccctcctccttcctccccaggtggatcagggagcaaccaggtccccagaaacactggacaacagcagtctttcttttttttcttttttcttttttttttttgagacagagtctcactctgttgcccaggctggagtgcagtggtgtgatctcagctcactgcaacctccacctcccaggttcaagcgattctcctgcctcagcctctggagtagctaggattacaggcacgtgccaccatgcccagctaatttttgtatttctagtagagacagggtttcaccaggttggtcaggctggtcttgaactcccgaccttgtgatccacctgcctcggcctcccaaagtgctgggattacaggcatgagccaccgcgcccagcccgagcagtctttcttcactgtccctccaaagagtcaatgtgggagactgcctgttctgtattagtcttccatctgcaacttggctattcattcaacgattgtggctgtcagggtactttagagtgagcattgggctgcaagtcaggacatttgggatctggtcctgcctctgccgctactgtgtgacattctctgggcctcagttttctcgtatggataataggtatttgggtcttttcctttgacttgctgtgattctcctgaaaccccttcctccagagatcatctctgggttcacagctggggacattggaaacaccttgggaggccgaggtgggcggatcacccaaggccaggagttcaagaccagcccagccagcacagcgaaactctgtctctactaaaaagataaaaattagccaggtgtggtggcacgcacctgtaatcccaactactcagaagactgaggcaggagaattacttgaacccaggaggcggaggttgcagtgagccgagattgcaccactgcactccagtctaagtgacagagcgagactccatcaaaaaaaaaaaaaaaaaaaaaaaggaaacaccttctcctccctgccccaacaggttgaattggaatgggatcctttccctcagtccctgtttctctttggaaccaacctggaaaacagatttgtttccaacataaaaatctagttgagtcactccccttttcaacaaccttcagtggctccctattggcttcaggataaaagcatctttagaatgacataaaaggtccttggtgatccagcttctgcctactctccaagcacctctcctgcctcttggccacattaggcttcagcttcctgaatctcactgcaattccccaaaaggttcatgtcctatccctgtgcctcacgcatgctggttttttttgtttgtttgtttgttttctgctcagaagagcttcctcctgtttgtttgtctcacaagttcctatttggccttcaagtctggctcaagttctagctcctccataaagccttccctgttttctgagcaaatactaggtgtaactcactgtgtcaagcagtctccatgcaccatcatttaattctcacaactccatgagataggtgtcattatttttcccactttacagatgcggaaactaaggcataggtagggcatagtaatacctgcattcttccctgtccccagcctccacccctatcccacactcactctgaagctctggttcacagggataacgcaatgggctaaggcagcacccccttcacctccccaggtggatcagggagcaacctggtcccctgtaagtgacttgcccagcatcacaaaatgagcagtcaggatcaagacctcacttctttctggctccaaaaccccaagtattcccttacttctggctcctgtccccatgcagattgcagcttgtatataccaaccaccaaaaatcactcttttactatgtggttcttatgtgtttgcatgtctgtagtcccactagactggaagctccttgaaggcagggctgtgatgattaaattggtatgtgcttgacacatcacggatgtgcaattaatgctgggtaaggatgaaagaaagtggaggggaagactcactgggttccctactggagcccacaaagcctctcaccccaaagccttgtgtaattagtttgtaattaattagcaattagttacctattgctgccgtaacgaattgccacaaatttagtggcttataaacaaattgagctcagaggtcagaaatctgaaatgggtcagcagggctggttccttctcaaggggagaattggtcccttgccttttccactgactagaggctgcctgcattccttggctcatggccccatcctcatatcactctcacctcagcttctgtcctcacatctctgtgagtctcctgtctcccactttccctgataagaatacttatgatgacactgagctcatccagaccatccaggatattctcctcatctcaaaatccttaattacatctgcaaaatcccttttgccatgtaagtaacatattcacaggttctggggatgagaatgtggacatttttgaggggccattattctgcccaccagaccctggaaactgagaatgagtcaatttggaaagaatgaagacttctgcagtctcaagtgagccctctgtctggcctcatctgcaatcatagggatgggactgtaggaggagacagggtcttgctccgtcacccaggctggagtccagtggcttgatcaccactcactgcagcttcaacctcctgggctcaagcaatcctcccacctcagcctccagagtagctgggaccacaggcacacaccaccacgcccagcttgagggacattctgtgagcccaggattctacccctgaagcaggagagattgaggtcagaccacaggagtaccatctccttttcttgccatgggtgacacctgcccatccaactccaactttaactctgactatccccaaagccccctcaacctccactgagctaaagtcttgtttctgagaccaagactggtgccagggatccagggacaccccctctcccacattgcctttgccttcctctcccggtgcgggacagcaggctctgtcttgggggttctgtgtacgcacagagccccgccagcgtgactcaaatggggcacagggacccttgagtcctccttgggtgtcttcagcaggaaaaaacaaaggataaaatatggttctgcttctcactggaagatttttcagggaaaagtttgataatttaactgggaggtaaaatattttcatattgaaataacatggacatgttatggagaagaatacaaaattggccagaattttggaaataaaactggagaatccattgctgggcagccactgaaggaaaagctggaggaaacagagtggggtcctctactgggggcccggggtcggagtggggccgcactgaattgtttagagagaaaacaggtgtgtgcgtgtgtgtgtgtgtgcgcgtgcgcgtgtgtgtactgagggcagccaggagtgaggggaatctggggagatgaatggcaaatctgtgtagaatgaggcctgggggaggtgggggtgaggaaaatgggcctctgttccttccgtccagcttccccgcccgccccgccacccgcagtcctgccttcaccacttcttccttcagagccttaactgggacctcttgcaggagaggcagatgtttctagatgaggccagatgctgagaaacagggaggaactggcccctctgggcttggatgcagtggggaataaaagcaggacaggaaatgcgtgagaagggagtgtgatctccagccagagcccttctatgcatgggcccagcaaatcctcacggcaactgggggaagcaggtgtcaggcccagtttacagatgaatagttgaggcccggcaccaccatctcagcttctgaggttgcccatttctccgccccagcccttttaccccctttccacactctggcttgggttttctgctttcagatggacgaatccatcccatacctcccccacagaatcccccttctccctttcagtctcacatagacgcttcctccctttttccttgccttgctcccctgtgctctcctttcctcctcctccaggaagctcacctgaggccatttcccagctctgttctgctggtctatctcttcttctacttgctcccctcccgcaatcagaccgggagccccctgtaagctcagactgttcctcccatcagatcacctaactagttcaaggctcaggacttctcacttacagtctttgttggggcgggacaggctagtcccccatggcaggcgctgggcatgagaagaggtacaaagggagccgcctgggggccccagatgaggagagagtcttggcttcgtccccagccccataaagaaggatgttaacagcctcttagggagtgggcgaggggcgatcaaaggggtggccgggggctcactgctgagggaatggctccgtccatgctcagggtcaatgctggcacctcctttctgccccaccaaatggagtgaaatactgggaggctgctgatgaaaaaagagtggcttattccaggtccctactccttcctaccacttcccccaatcagggtctccttggacgcccctcccaaaaaaggtccatgtcttcccctcccaggacaccctagcagctgtttgtttccttccatggagtgagtgaggactgagtggtatcaactgggagagaaggaggggaaggggagggaggccccagctggcctacaacaacctgtgctcccaccagcctgagtgcccaaaccaggatctgagagaggctggaaggcctgcctggaagtgagaagttgggaagcagagccagacagggactgctatgggaaaaaatccagagaaagccagcaaggcgtggaggaacccaggggctggtggtggaaacctggatagaggggtcggaggtggtaaacaggtggtgggtggactgaggctggcagaacccttggtgggagcaccttgtatatgccaggactatggctcttggggatggtaaactcattattttataggtggggaaacagaggctcaaaagcaaagaaggacttaactcagaaccatatcaacacgagtcagtggcagggccaggactaggacccacgtctggacttgggaacaaggagcaaacggcttgtctccagcaccctgtgtccatctaaacttacaacaatgaatttctcttgaacattatatcatgtgcattttcactgcacctacattctctgtgtccttctccccgagattctaataccaggctttttcccttccattgctccatccctgaaccccaacccacctgggccttgctctgcctatagaaccccctggaccagccctgggaaaggatgccacacccaccccattcactgcctgggagtctccatccccctgtctcctgcctctggccacacccttgattttcacaattcactgactcaggagagctacagccatcctctcagtgtatgtctgtcctgacctcttctccagctggtcccttattttctcagaagtcacttcctgggagaatggcttgtgtgtcctggacagcccacctccaatgcacagctcttgtttctcattcacataccatgccaaccgttgagggccctgcccaggccatggaaccagaaagcaacaaattcataaaacatcagagctggaagggaccttagaagcatcatctaccctctacctcattaaacagataaggaaacggagggccacagaagagaggtgacttgttcatggtctcccatggaggttcagaatccagatttcctgactccaatctgtgttctctgtgtggcttgtccatgtggttgtccaggtcaggtacctgtgggtccaggggtcacatagactctggccaactcccagattgccttctggcaagacttcttaaagtggatggcttcatctcgggagacaggccaaacaggaaggtggagagtagagaaagaggagagagggcagctcacccatccatcaaaccagtattgaacatgtctaacgtgccagaccccatcacagaagcggagctgagcaagtcatagcccctgccccaggcctcttaggcagggagggggcagacactctgctaaccgcactactgtgtgtggaagtgctaggctagcaatttgagcaaagtgcttggaggagcacagaggagagggcaattcatcctgcctgggcagggtgggggaagcttcagagatggtggaaggaggagactgcaagttgccaggtggagatagggaaagggcattcctagcagagctgacagcaggagccaaggctgagaggagggaagatccttggtacattctgggcaaggcgagcaatcccatgtgcccagcaacttactggatcctgaggggcaagtggccagaggtgggtttagaaaggtattctgtgcccacctgtgaaggccctttagtgctctatctttttgaaacttttgatttacttatttatttttttgagacagaggcttgctctgtcacccaggctggagtgcagtggcgtggtcttggctcactgcaacctccacctcccaggttcaagtgattctcgtatctcagcctaccaagtagctaggattatagacgtgtgccaccacacccagctaatttttgtatgtttagtagagaaggggtttcgccatgttccccaggctggtctcgaactcctggcctcaagtgatccacctgcctcggcctcccaaagtgctggaattacaggagtgagccaccataacattttatcttgaaagtactggggagtcaatttttttttaaggtagaaagtgaagtattcaattgcacttgaagaagtgcactctggcagcagcacagaggaaggaattgaagggaaggaccctggagacccactgggagagtactgaaattttccaggtgagagaggcccagggtctgagccataccactgacacacagctgggaaggagaggtcccatgagggtcccatttcacaacaaaactggccagattccacacccacatgcctggtcagatgtggaatgggaaaaggcagagggaggagtatccccatgttgctggcttgggcagccagtggctaatggtaccttttgcagagaagagaggaatgggctggggaggcagggataatgagctcaggtctcaacacagtgagttagaggtccctgtgggacagctggttggccatgtcacacaggcaggtggatgaatgaggctgctttcaggacagaatcagagttgtgtggctcagagatcatctactcaagctctgaagcaaaacagacctgggttccaatccggctcctatgttcttacttggggtccttggacaagtctcttatcctctccaagcctcagtaatctcagctataaaatggggaaagtaatagcaatgatcaaatgagaccaagtcatggtcagccttgtcacatagcaacaagctctggctctttctccctccaccttctttgactccctcagtgcaattctagttccccaaattcattcctacctaagagggtccagacagaggacttcctcccctgccactaccttgatgccaaccattgaccagtcatattagagtccagctttggggcctcagccggctgcgaagaacatcaatacagagactcccaagggctcaggcaggaggctctaggctctggctaggctgacagggtgtggttgttcactacctggccgagctaggtctctgatatgctcttgccttctgtgggcttccactccctcctctgctagaggaggggacaagtttggatggcaggagttggcctgggtgatccctggagcccggtccagtgctcctatttcttaggacctggcaacgcaggtctagcctctgctcgggaagatgaaggaaaggggcaggcgccctgctccctggctgcgctaaggggtcactggcggggtcttttctcacggtgaacctgtctggagggtggacggggcaggtgggagggcccgtgtcagggagcgtccaatgccctcgcgccatgcaaatggcacgcaaatgacccgcatgcggccctgcccaccgcagcttcccggggcgagggtcttcgcagcggttctgaatagaaagggcgctggggacgggggaggccgtccagagagaagcagcactccccaccctgccagggccaggaccccacttttgtggaagggaggagcgagtcggccctaatggctcatgattcatcgctgggctcttgtctgagctaattggctgggccagcgactgattcatggcagggagccgggctctcggggacccccgtgtccctcccccgcgcctcccgcccaggaaaggctgcgtgaggcttttagacccaggatccgttccaagggaccgctgcccggcatccatcacggctgacagactggggatcggggtgggggaggggacgccgacacggagctgccatcggatgcgacggaccccaccgagcaccccagccacggagcggcttccgcgggcagcctggggcctgggcggggtcctagggagtgacactggggacatccaggcaggtgtgagtggtgagaggtggcctccgagagtgtggggagatgggatgcagctggaaagtgggaagagcattgggggcaggaggagaggctttgggaacaagagagggtggggctcaaagagaacagagatctgtcccagggtgctctgagcttcatctcaagttgcccagaacaaaaaagacctaaggctttgtttgagaaattgctgtgtgacctttggtaagtcactatccagcctgagcctccacatctcaggacctttagtggaagaggatcacccccaggcataggcactcttgggaacttcctttggcagcctcttgctccaggcatccaagaatccctgtactgtcattaattcattacacttcacaatgacaaaaaatgtccaccagtgcctgccctcctgggtccagggatgggctgaggctctgctccctggacagaacaacccccaacacacacacacccattctcctccagagtatctcaccacatagagagattttcaagttctccaaggccgctaatgtctccaccccacatctgggccgaggcagggcatgaaagcacacacccaccaggctggagggggagggcagctgtccaccctgactgtcagaaatagagcagactctgggcaggggctgggcagggtagggcagggctaggggttggaaggggcctagctgaagctcaggaaatatctcctgctggaatccatgaatgaatactgcctgcagcctccgcagagggagccctggacttgcaacagcaggggatgaatggagaatgcagcccgcagcgaggcaccaccagcctctccgtggctccagccaaaagctcaggcgtcatctctactcctccctttgaccctcagcgacagtcagttgtcagtaaagactcctggctctgattctaaactaaacatagaatcaggctcttctctctgtgtccactgccgccagcagctctcagccagacactgcaacagcacgggtctgctctcccctcctggcttccacgctggcacctgcaatccattctctgcacgacagcaggaaggatcttttagatataaatcagacctcgtcactctgctactcaaaaccctctcatggctttccatcacatttaggagaaaattcaacctccttgccttaccttccaaagccatatgcaatctagcccctggctacctctctgaccccacctctggccagtctcactccacttacactggccttcctcttctggctctaaatctaccaagctcattcacattcagggatttcagggtcattcccatttcagaacctttacacctgctgctgtttctgcccagaatgcttcccccacccccaagttctaaacctggttagctccttcttggctttcagccatcagcttaagtatcacctcctcagagaggccctccatgactacaccatctgtcgcagcccccaggcactgtctatcataccagcctattttattatcttcacccttataatgatctgataaattctcatttatttgtttaaaaatctgctgccctccctgcccagtcctgtctcctgagccttctctgtactggctgctgcttttgggggttgtctggatctctcctagcactctgagggttgaaagaaggactcaaagggcaagactcgccaccagcttttcctaatggggtattttgccgcttctgcttttgtttttggaaagttcgtcttctccatatcctccctgcagctggacagctagccctaaccggtggccggcccaccctgcatcccaccccatggcctctcgcaggcaggaagctgaggggcagagctgtggtgggagggtggtcaccagaaggtggcccctctttgctcagggtctctgtggctttgtaagaggacaggtggcttttgggctctgaagctggcagggaggaggaccctgcagcatccaggagtctagcagctgcccacatctccatgcccaacctctgcccctggggaagaggagtaagaagagctgtctcaggagagaggatcccacccaggagggggtggccacgccttgcgggactgccgggccaggaagtccctctaacctcgcctccatccactctgctgcaatttgagctctcgggtgacctgagtgaccctaatcctcccataggatttatttcctttcctccaaccccaccacagaggaaactgggggttagaggtcaggatagaagaggccaagttcatgtcctcagtgcttagaggccagggccaacaggaagaggctctgctgtataattggcaatagggccagaatggaggaacaaatctccattttctggaaggaaaactgaggcgtggagggctggttccacctgcctcagttttcctaaggccacctggggaccaggatcctcctgccactcctgccttccccctttcctggagggctccaactgccttcagccgccactgcagacaccgtcccccatagggggcccctgagatgtctaacaccccctgtgcctcttcctttctcttctctctcccctaagaagggatgggcttcctgaaggaatgtggtgacctctgaccctggtggtggccactgctggctctgcccaatgcccacacctgggggaggctgcttgtctctgtagtggacccagtgggtgctctgaggcaagtggtgtttcttctctgagtctcagtttctccatttgcacagtaagccaaagggtccctctgcagcatttgttctgtgaagccatccagctgggagatgggggggtcaatgtacacacaaggggatgggacgtgcccacacaggggagttggggtggagactgcagtgccattctgagatctatcaccttggccactctctggtccttttaatttaatttttttttactaaccctcttcttccccatgcctggctctggttaattgcgagaaaaaaaactggggagggggctgtagaagaaaggagcagaaggcatgggaggacccccagtcacctcctatcctgttccagccatcagccactgaccatctgtccccaactcactgtcagccgaggagggtggcatggccccactctaagggctaccatttgtggagagacacaggcctcatctcttagggagccccacggggaggcacaggtcctgccctcaggtcttttttaaagcagagtctccctggcctaaggtcattcttccccaaactctactgatatcaagacatgaagattatttctctgatactgggagagacttggcagccaccccagctcctgggggctcagagagggtgaaacctgggtctgggaccaccctgtgagtgagccacaaaggttgtatgttgggctgagcccacccttggggacgccagaaaaagggcaagaaacccaacaggttgaatttctgaaaaatgcaccaggatcaagtatatgttctcagccatctcaagtgtggttttaaatggaaaacaccagccaccagggcagaagcatatttagatgaagaaagtccctccctcccccacccgcccgggagctttctttttgcaaaggcaaacgtgattatatttattttgcaggcctgggaggcccaattgttacccctccccttctccccactgcgggacacagatctggactttaccaccagtggtttcttctgccaggagcttaggggtggtggagagttgctgggctcagagagaaggatcagagttccagcctctgctttggatgacctggagaaactaaatgaactcagttttctccatctgtaaaatggaggtgatcagatctcctcctgtggtcaccagcctgcaatatggtgcgcaatgaactttgcatcctggaatccatgctctgtgtcccttcccacactgcacagggctcatgtctatgaccgattgaatattgcagaaacgattgtgtgagatgtcataaaagacacaccttcctccttgttctttcctagatcacttgctttacaggaagccagctgctatgttgtaaggacactcgagcagtcctatggggaggcccatgtgctgtcaggatcacagccagccaggtgagacagccatcttagaagtggctcctccaccccagtcaagccttcagatgactgcagccccaggtgacacttgactacaatctctccagagatctctagccagaactacccagctaagttgctcccagattcctaacccacagaaactatgtgaggtaatcaatggttgtaattggtttaggtctctaaattttgggggcaatctgttatgcagcaatagataactagtacatcccaacagtccctaatccttctggcctggaccacaccagtagctgcccccttgtctatgggccctgggtccctctctatcccatttgtgccacctgctacatgccagaaccagccttctttgccttttctcatctgctggtgtttcccaaacttgtcggagcttaacaatcactgggaaaccttgttaaaaatccataatccctctagagggtctgagtcaccccagcaagtttaatgatccagcaactctggaaaattctaacctatgtagaagcttcttacatggctcctagcacataatagttattcaataaatttttttccccaaaactccgtttccacccttatcttcttaagggatgccacataatgaacacacatgccatgtgccagaaggtgctaagcattagcctattaattctcactactggttaggtgcagtggcgcacacttgtaatttcagcactttgggaggccaaggcaggaggattgcttgagctcagaagttcgagaccagcctgggccacagggcaaaagcccatctctacaagaaatacaaaaaaattagccagatatggtggcatgtgcctgtagtaccagctaatcagaaggctgaggtgagaggatcacttgagcctgggaggtcaaggctgcagtgatctgtgatcatggcactgggcaacagagtgagaccctgtattagtccattctcacattgctataaagaactacctgagactgggtaatttatgaataacagaggataaattgactcacagttccaccagctgtacaggaggcatggctggggaagcctaaggaaacttacaatcatggtggaaggcaaacgagcagcaagcacatcttcacatggcagcaggagagagagagaggtggggaggtgctatacttttttaaacaagcagatctcgggagaactctattacgagacagcactaggagtatggtgctaaaccattagaaaccacccccatgatccagtcacctcctaccaggccccaggccccacctccaacactggaaattacaattcaacttgagatttggatggggacacagagtgaaaccatatcagaccctgtctcaaaaaaaaaaaaaattctcactcctcctctgaggtggtttgtgctagaaagctgtggagccaggacttgaaatcagctcctttccctccacagtctactcttaaccactgccccacaccacctcccataggcaccacccctgcccactggctgatgtctccctgagggctgccttcacatccttctctcattttgtccccagctcgtcccactttggaccggtttgatccaactcacaattctggcatcttccttgtgccagatgagctctccctgtcccctaaccaaccccttcactaaatttcatgccagctatgccctgcctgcccccctcctctgcaccccaaccaaactctatggctccctctgccaggaagcctgcctgggctgcctgcttcattctcatgtctccttctctgtccctgggtctaggctggggcccccagtgcatcagtcttgccaccctgccccaccccacctgcctcagtttcaaggctccacaagggtcagaaactctgaaagggggttgctcaattcagaggcagcctggcagcagctgtgtgatttggggtcagtcacttgaattctctgagcctcagtttccttattcctacaaggggcatctaaatcctgcctcccatggcttgtggtaagggctcaatgagactgtgactttgaaaagcacctacaggccaggcgcagtggctcatgcctgtaattccagcactgttggaggctgaggcgggtgtatcaattgaggtcaggagctcatgaccagcctgaccaacatggtgaaaccccatctctactaaaaatacaaaaattagcagggtgtggtggtatgtgcctgtagtcccagctactcaggaggctgaggcacaagaatcgcttgaacccaggaggcagaggttgcagtgagcagaggtcatgccattgcactccagcctgggcaacaagagtgaaactccatctaaaaaaaaaaaaaaaagggaaaagaaaatcaccttacaggttgcaaagtgctgtataaatgtgaagggttagtatatatgagttcttctcaacactgcctttcctccaccacacacacacacacacacacacacacacacacacacaccctctgctgaagtccaggggttactttaatgctccccaaagcaccccaagtctttgttcatgccacctccactgctcagaagctcttccctttcttctttgcctggcttgcccttattcatccttctcacgccagctcaagtgtcactgcctccatgaagccctccacttctcctggcagaattgatgccttccatcttctgcatgggtgcctttgctgtcttcattatcctacttgtgtcagcttatacagctacctcccccagtggaccatcttattgacctctgtctgtatgcatgcagcaggcactcaatacatgcagattagttttactttccctgctatacattccagtcttacttaatcatagtttgctgcttctctttgctatccataaacatttcctcgttcaaataggtcttcaggattcactcccttcccctctaaaaaaaatctccacccattacctgccctctgcaaaaagaaccaaaatgaggcacgactgtggtctggcactcagcctctctcctagggtctgggacagacaagaaaggcattgggagggtgcaggcaggcaggaggttctatcactccaccgccacccaaggggaattggctttggctccactgttgtggggatgggggtggggggtcagtattttgttttctggcatttcatttatgccttggaaattggcttgggctgtcaggggaactgggaggggagcctggctggtggcagggggtgtctctatgagtagtccttgacatctcattggctttctccctgtgctgagggcaagatcaaacatcaaaagcacggcctggctggtgcctaggctaatggaaccgggcaagcctcttccagatgtctgcagctgttttctcctattccccatccagagtcttgggcttggagactcatgtgagctgcccagtgggtcacacatccccaggtttggggctgaggctggcctccccttctcccacccacgaccccaggtctccactgatggagactctctcacctcccccacttcccctccttctagccaaggattcttttaatgcaccatctactgggaagtccttcttgctatagaacttgctaccttcctgctgcaacagtctgtcccctgggactggaggaagggagaggaggagaaatgctcaggcagagaggaaggaaagagagatgtttgggatcatttgacatggggaaatgtggggagataatgaaatatgtggagctcaagttaatttgaaaatgggagcactccacttccaggcactcagcctctctgatatcctcagagaggatatcagcctcttagctgcccaaatccctcttcccaaatgctataagcttctaataaggatgtaatacaattgaatttattacaaacttaattgtttatagaaatttacccagctgcagacaggactgggaggatggacccagtgggaggatgggagagctggagaaacagatgaggagaagggagaggagtggaggagggatgggaagagagaaagggaaagaaaaaggaggagaggagcacaatgaagagaaccaagaaggaagggtgtctggagaaggaatcagagagaaagaggatgggatggaaagaagcagctaaagacagactaaggggagagtcaagaggaaatgcaaaggaagagggctcaaggaagaataaaagagaggagagaaaggcagagacagggagacaggagaaggtggagaaggcggagaaggcagggaggagggaggaaaccctgcagatagcagtggggccttgctgcccagagaggatggtctctatcggggaggagacccagaccactggtgcccagccacactcagaggactggggacagtggaagacagggtgttactaggagaattagcttgggggattgctgccagagggagagaaaagaatgtcctctgtaggtgggagagctggacgatcaactatggaccagtttcctccgaggtggcacccccaggtcaggatgatcagaaggtgaggctttgggtgctgcagaatctgtgcagagaggctagagccagctgtctccgtcccttccagcctgcatctgtaagatagggagggtcactctgccctcatatctcccaggaatggtgtgggatttggtgctgctactcagttttcggatggggacccgaggctcaaggagcgggtagtgatgtttccaaggttaccctcagacagtggcagggttgcaatcagaactcaggtcatcttaactcccagtcaagagctcagtctgcaaagactaagtcatcgcaggagtttggtgctgatttctaaagtggcaggagagccaggggaagggcggggcgttttggctcacctgaggcccggctgtcagtccgtgactccctgcctccacggctctgaggaggccccagcccatgttggtgagcgagtgctgtgtgtgaagaatgggccccgtcagcctgagagggagaggctacattgagccctcacacgaatccatgtagtggccaggcgggacactatgggtggggtttggagaagggaaaaacttccagagacagctcttcaggactggtgctgagacagggacgcctgtgttgcaaatgtggggaaggcatctatctgcagggagacatctgctcttattcaattgatcagagccgtgtgctggcttttctggctgagccctggctggatctagaaacttccaggaccctctcctctgctatgggtgctatgtcatattgtccttctctttggttgtccactccctcatcccaacacacataaacacacacagaaatccacattctttcattcattcaataaacacaagcaattagcacacgttaggcgcagccttaggcactggggattcaccagcatggtgcccattatccaagaacatacagtctaagaggcagaggcagacacagtctgggacaattctacaataggaggaacatggagcctggcctgaagtaggtaaccaatgaacttcactctcgcccaggctggtggtgcaaccatagctccctgcagcttcaacctcctgggttcaagggatcctcctgcctcagcctcctgagtagctgagattacaggtgtgaacaccacatcacctaatgtttttatttctttgtagaagtggggtctccctgtgttgctcaggctggtctcaaactcctggccacaagtgatccacttgcctcagtctcccaaagtcttggaattacaggcataagccaccactcctggcaatattcattgaatgaatagtgtgaacctagtgctgggaagcagaggggagaagggggctcactgtctgtgggagctggccaagtagtcacagaggagcagcatttggacaaggcttaggagactccaagctccttgaaggcaggagctgtgtcgcagtcatcctcggattccaccatcctgtgtagtctggcatagagcaggagcacagtgtttgacaaatgaatgatgcgttagtcaggaacctctgggttgtcaataacagaagtccatctcaaacctgcctaagaaaaaaagaagagactttatggctcaacataacttaagtttactgcagtagggttagggttgaggtccggttaaagctaggtgcaggtgttaaatgtcgccactgaccatctcttggctctgctttttccatatatcagctttattctcaatcaagctctcccagggagtggcaaccccagcacaaagaaagcacttctttccatgcagcccgaaagaaagttcagggctgactctcagtggagatagtgatgttcctatccctgaaccaatctgatggctggggttattgtatgcaaatttgccccgctttgctcacatggccacacccagagtgggcagaggggtgaaggtggagtgaaagtaaacttctctccataaaagagttgggaagaggaagtttcccataaacaaaaaggcaaagtggtgctgagaaacagatgtccatgacaaatgaatacatgaatgattggataagtgaattgggcctggaagggtgaataggagttcaccaggtagagaaaagagcaagggtccccttatgcatgtgtatacacacagagtctgatttcaattctgttttattctcaaccccagctgtccattcgtgtctgcccccatctgtgtgtctggatcatcctggaagccccagagggcagggacaatgtttgccacactccatcttggcactgcccaggcctgtccatttagacacttaatcaaggctgtttgggttctgcagctgaccttccctgcaagcagggagttctctcccttccccagtagatctgggctgggccaggccactgtccagtgccaggggaggggctggaagcagtaaagagccagagacttgagaacgggatgatagcagccccctgcccgcagtctctcctgttcatctgggaattcctccctgccctcactggcatcagcaaggccttaaaatgtcacttgtgaagtgtaaacttagcaatgtgacattaacagaggggtttttttaagaggaaaaaacacatacaattgctcccttctgtttcttttttttttttttttttgagacagagtcttgctctgtcaccaggctggagtgcaatggcgcgatcttggctcactgcaacctccgcctccctggttcaagtgattctcctgccttagccgcccaagtagctgggactacaggcgcccaccaccacacccagctaatttttgcatttttagaagagacagggtttcaccatgttggccaggattgtctcgatctcctgacctcgtgatccaaccgccttggcctcccaaagtgctgggattacaggtgtgagccaccgcacctggtcctcttctggtctttgagcacatgatgcaaggagtttacctagagctgcggtttcacttctttctacctgatactctccctgtgctgcaccttgcctcccaatcacagcttttaatggctaaagtccatggaggggctttcttttatgtccctgatcctctaccagtggctgtttaagctgttgttggttatctgttccttccttcactcctttatcatacattcattcacccacagcaattgagtatctgctatgcaggcttgctctaggcaaagaggacactcagataaaagaggcaatcactcccctccccaaggagctcagcgcccgggtggatggagagggaaggaaagcaccagccacaccacagagtgctggtgacaggcagagaagtacaaggtgcctgaggtccgcatcagtcacccaggctgtaatgaaatggaggacttcctggaggaggtgatgcctgtgctgggatgagtagaagggagtaagacagtcccaaagagggacatggtgaggtggtgaggctggagaaagagaaatgatgagtcattggcttacagctttttctgcagctgagttccttcccctccctgctgccatgtcttcattcattagtttgtttgactgttcatgcagctcattcattctaacctccctccctcagtgccaggcacaggctgggtgctgtggatcccaacagggaccttctgttggaacccagtggagcagtcagcagccctgtctcagacagtgggggtgtatgcttgaagtgggaggggggaggcagccttctgccccctaagatccagagttgggctgagattgagggtcacaccataggttcccccataaagtttgggtgaccccattgctggcccgctgcaggaggggcctccaaggaggactgggatgggagagggacctcaaaaggcagaggaaggagagaaaagtcgccagggaaattagagtttctgaagctgccttggctgcagtaatgagaaccagagaaggggctaatggagatcagattgcccgggggctgcctcccagcagccccctccccagcatgctgaaaggagaggcctggggacaggatgtagatgggaaagggccactctctccacgtggtccatctcttaatctcagctggagttgagggagttgaagctagaggaggaggaccagatggactgtatcctatgcgaggtggtcagagatggggagagagtgtagaagccggctggctactcagcccccaggccttgggctccacaggtggccactcggttattgatgaactagcctccccatgcacaggaccctctagccatgaagggctggggtggggcactcataggaagaagaaaacctgggctacgccgctgagaagatttccccacctgatggaggggacacactccagaaagccccggcctaggatgcaggatgtccctggcctcggggagcccgtttggtgagagaggtggctggtgcaacagtctgcctggctgggagaagtgacagtgctgaccccctggaagcactcacaacaaggggaagacaaaactactaccacttctaggattagtacttctactactagtactgctagtaataataacaacagcaatctcaaattgagcattcattttgtgccagaaccctagttaagagttttgcacccacttagcctcatttaattttcacaaccacctcaagaggaggaaagggctgacgtcaccatcattttgcagatggagaagacaaagctcagagaggggaagtcacttgcccaaggtcagagccctcaaggaagcccactgagcactggcccccgtcgcctgatctccaggaggccctgtgctctggacaccaagggaccaagagtcagtgagcccaagccatcgctctccactgtcctttatccctctgtctttctctatgtctgcctcagtctctgtctttctctccttcctctctcttcttctccatctcagttcctctttctctctctctctccttgtctctccctcctttcttctgctctaactctgtctctgttcccctacttccctccctcaagtgcagtcaaacaggtcacttggcccaggaaggtgctgagcaaatcccatggcgggggctggggtggggggattctgtgcccttgacctgtgtcctttcccccaaggctgggagccaggagccagggcctgcctgcagggggctgtgagggcatgggggtggggcacacaggccacatgacctcttgaaggatgccaacagccccgggagaggagacaggagaatctgggcatgaggcagctgaactcgaggtgggacggcacaggagctgctcactgggtctccgggccagggtcatggtgcaaggtggggacaaaaatcctcctccctcctcctccttccaatccctcttttctcttcctgtccttctgtttcttctctctgcctcctttctccttctctggttctttctcctcaccccttctcattttctcctcctccctgcatttatcctagagcttgcattttctctctttctttttctctctctcttttctccctccccacccctcctccccttctatcgatcagtctccccagctctagccaacacgaaggccttggatggtactcacagtcttgctttaaaatttattgcccagtgaatgcggcggcagatggaagtctccaccaccccacccccaccctctctatcgcctcatcccaacaaaagccaatctagacaaacgtcgtccatcaaatgcaccaatatggggttatttataggctacccccttccaagaaagcagagtgttttttcctcctctctctcttttctctttgagcgttcacagctcaggagtgagagggacggtgggattcgatattcaagaagctgcacaatgaggttcccatccgtcagattctagggtaggggggcgtagaagtgccttgattggaaatgaattaattagaagtgaggctcttcaagtctccaagttgggttatttatagtgttcggttaattttgataattaacactgggaaagaatagtgagttccgggcaaagcagtgcccgccaacggagacgcgcttcccgccccgtcgctgcccctccccacttgctccatttggactctgtcaaaataggctactctctgctgccgaggccctgggttttctaaaagtagaatgtaggtgggaaggccaaaggcataggggctgcagtaggggactcaggctgtcagaggtccaacgctatagcaccaggccagtgctcctctcctcttctggccagatggccttcctggagaagcaggtgccagctgctggtccgggtgggatgtgcagtgtagcccaccgcactgggagagcaggagaggctgtacccaagctctgggcatagatgttcattctaccaaagcagccaggaggagcgaggctggaccaaccagggtgacaggaatcagagacagccagacagctgccaggtttgaaaggagagaggagaatgggagagcttctcggagaagcaggaggttttgacctgcagcctgctgtctgcctgtgggcaggaagggcatttcaaagagaggcagtgatcaccacctaccaggaaaggggacttcagaatttgccagctcccctcaatccatttgctgccccatcccctaccttgccaccaaactgatagctcagcatttccatccacaccactccctttcgcaagcagcaccccctggcccgcccagagtgccctgccctctcccctgtgagggtctaccatggttcaaggccaactctcctgttgcctcctctgagcccagctgagtcggtggcttcccgcctccagggcccccctcattttgtttagtgggattctcagtggtggcagagagggctggtggtaaagataggactggaaagatacggaggctggattctgaagggtcctggatgtcccactagagtctggccccttccctagaagtgatggggaactgctttcttgcctgggagctgggcagtgggctgcccccaacaccagggtggttcggcaggcagagatcacattccttcctgggttaaggaccaactccccactcggagtgcagagcagggggaccaccccagcgcaggtacaggaagtggtgggaggcctttccctctgggccccagcagcagtttctgcagtctcctgtcccactggagtgcagaggcgggttgggaacgagaagaggaacttcaaatgcaacactcctgccttacgctcttggagggaagctccactcccgggcctgccaagggctggggccagaccggaaacgggatcatcttcgatcaagggctgtgggctctgctggttcctgctgcctgtgccggctcccccgtcctcccctcctccccttgcggatgttctcaggtgtctcatctaaatcccttccctggccactcccctctcctctcttccctcttgatctgtgatagaaagagggaggggagaaggggagagtcctcctcctggtggcttctgcctgctcccaatctccccatctttgtattgatgtaagcttcacctctctgcccactggcatccgaactcccctgagggaagcctgcagagactgatcctgctgcctcctgtgtgctgtgcgcccgcattcttcagtctctgggctctggacagaggggcactgggccacccctgggcttgccccaggttgcctgggagttgctgatccatattctagcctgaattctctgtggcagactgcagtcctccttgaggacagtgacttggtccccctcctccccagacctggggctccccagtagtgtggaaatgaagtatctctgttccccaccccaccccactccaggtccagccatcccaccctccacctgtgtccttgccctgttcccagtgcccaccagcctccaggccctgctgctctctctggcagggcctgcggcactggcagctccaggccaggcccctgacctcaggccgccatgggccagcccccagacacctctcagtgtttttgcctcgattttcagcccaggggcctttggggagctgcaatcccgtctccagcttcctctgaaaggagagcacatttttaattaaagtggaaaaagagctgaaaatctgttcgcatttaatcatcttgacgacctttttgcttaagagtttccagctgaggtggagggagcatataaggcgggggcaaagacatttctcaagacccggcctgggtcgggaacaaggagggagaacctctgcagggatgaataatggaacaggagcggaggtggccagggctctgagtgccgactcagcacttcccctgctggctccttcaggaggtgcccccaccctgcctctctcccctcttctgggcaccctgtaggctgggctgggctggacaagaaccgggactcagactccccagggagcaggagcagaggccatgtgggaaggacagttcctctctgtcacaggcggaggacacaggtatggaggggcactgtgagtggcttctagacacacagagaattggggcaatgctgaggggcctagcccaggccttcttcaccacacctgccgaaactgctgtataatccccttctctgcaactgccttactgagtgacttggaacatgtggcacatgtctctgggcctcagtttcccctactgttgatggcctctgggctactttccacttctgaaatccgactcccagcctagaatgtgtaattgagaatgcttgtgttcctgccccaggtgtaacatggtcctgtttgttgttgttgtgttgttgttgttgttgttgttgctgctgcttgagacagagtcttgctcttgcccaggctggagtgcagtagcacgatcttggctcactgcaacctccacctcccaggttcaagcaattatcctgcctcagcctcccgagtagctgggactacaggtgcctgccaccaagctcggctaattttttgtatttttagtagagatggggtttcactgtgttagccaggatggtctcgaactcctgaccttgtgatccacccgcctcggcctcccaaagcattgggattacaggcgtgagccaccgcacctggcccaacacggtcctgtttgattggggaactccttagacatccctccccaaagccatgggctgtgtatctccccctccctgctcccctgccagccccagagcctaggagaggagtattgcactgaggttctcctccgagttccagacccacctctgtcctcctaaggactgtgtctccctcctcagagcagggggacttccaggcctcagactggagcttcctccagggcaggactgcatttctctctcctccttccttggaggaaagcactgacttggcaagtggcattggtggtactgaaagagctggtgcaggaagagctggtgactcagtcttctgcttttaaatttccagccctgtctcaggggtcccctggcccggccaacctggccttgcaatggcaggactgggaaatgatcctccttcacctcctccccttcctgagcgctcagatgggttttcccttgaaggggaggcgggacttagtccaaactgtgcatccatgccctttgccctcccctgctggaaaccaacccagacaattgcacttgaccccacttcccagacaagtccaagtgaagataagctgaagcctgggacgtctcctaccccagcgattcccgtgggaatcttgctggagctggaggcctgtcatagctctggctcttatctacagcaggaaggaccccgggcctcagtctccagtgctgaaatgtcatctcacccctcatccggcctccagcccgcaggcaccatcagcagcagcatcaaacagagtaagactaattgacatctcttcagctcatctgactttcaaagcacactcacactcaatacagtacttccttgactcctcaaagtaatttggtgagactagtatcttatgcccactttacaaacgaggaaagggaggcctagaacaagaaagggactgtcacaaggccacacagcaaataaatgatagactagcgcccgtgtctcccaatgcctcttcctcctatcttcccattgttgacttcccgctgttccagccatggtgtagcctatttagtttctctttaaaacatcctagcccgtgccatggctcatgcctgtaatcctagcactttgggaggccaagatgggtggattgcttgagcccaggagctcgagaccagcctggggaacatggcataacctcatctttacaaaaaatataataattagcctggtctggtggtgcacacctgtagtcccagctactcatgatggctgaagtgggaggatcacttgagactgggagtttgagtctgcagtgagctgtgatcgcatcactgccctccaacctgggcaacagagcaagaccctgtctcaaaaaaaccccaaaccaaccaaccaaacaaacaaacaaagtaacaaactaacaagcaaaacaaacaaaaaactatcctgcctgtccttggatgcaaaacaaaaagtgaaaaagatgactggatgcttcagaactgtcaggcagctccgcagtccttcagggctgggaagaatcaaagttgagagttgcgaggaacttcctagaggaaggctcctggaggagaactgtgtgctgtagaggtgaggagagaggcaggaccagaaggcggaggtaaggggctggctcctagactcagggagatggctgccctggggtatggggtactctctgtgcccttcccattcaagcacttgggtttagcattgcccactctgggtaccccttctccaagacacaaagcctagggaagatgaagtccccagcacctatgtttgaatgaagtgaccagatcttgtgacattgacagaaggtatgggtgccacacgggggagtgttgggagagagggtggcctggaagaaagacgactgcagacgtcattctactgtcatgtcaaaggaaaagagaagacaggcaagggcttggaggtgggagaagctgacgaatgtgggtcagatggggctccttccaggatagggtggaggcgcaccagcctctgaggctggagcagacggtgggggagggcactgtgcaactggcccactttgatgctcaagttaatctaactggactccaaccttgctaattcctcccacccctctcactactaattcagctccagaatcaaaactcgctgaccccagaccagtccccaggccccaccctgttccctcattggacagaacccccttgcagcccaggagtcagctcagaggtaatcactgcatcatgcttcaaagccgctaagcaagctctgaatggggggcagcaggtttcacttaccttgcctggccgcctgcccggggcagatgggatgcagctgggggagggccccacctcgtcctccgctctctccctggctctctgccttggagatggttgtctccttgcccacctcatttcacccctcctctggttggacattggaattgaagaataggggaagtgattcccccaaagcaggaaaagtgagaactggtgaaggtcacttccctggctggcctccacccctcctctcctgccccctaagctaaattctataaatacatgtcaggagagagtctgagtagtagctggagggcagagttcacttctttgagatggaagttctatctccccaatccacggggtggctgccagtctagctggggtgaaggctggaggagctgggatggatgggagaagcgaccggggaaggcgactgttgagggcctggtgcagaacagtggccacttacggtaccactgcttccttctggaggtccttggacaagtggcttaacgtcttcaagcctcagtctcttcttctgtaggatggtgatcccagtactgtacttccctcatgggattgtagtggagtttaagggggtcaagcagtcccaataagtgtgagttctcattgtctgcgatcccatttctgcttggaagttggctggagctgcaggctggctccccagcaactgctggggacatgaggcacagggagctgtgagttgtgctttgctgaggggctgagatgaggggggtggagtggaatgggaggacagggaggacagtgtgtattaaggacgttgcctttctggaggggcagggtgacggtggggtggtgagctatataggggaggagttgcccctcccatttgattcctaaagatgcagtttgacgtgactgccactcccagctccatgtggaattgcactgatgttctccaccctttctcttcagagtcactataggaccaggaagcttgggggtggggggtagggggaggagtcctctctatgggcactctgttataggagatggttctgagggactctccaggaacactgctggcctcttggtgccctctgtgggatcccacctgctggtcagcccctacgagccctctctccatgccatatcctgcagctgtggctctaagtgctgaggattaggagagagggggctgggaagacagtgtggcttgtcaagcagggagaaacttttggagcccgctcatgtctggggccaggagttgtggacactagagggttatactcaggcaggcagtggctccatgaggcctctgatattgttcctaggaaaaggaagggccagtgcatcctgccctcatgaagaatctctgttgctcgtggtggtgcagatgtaggaagataggtgttggaagccacggccatggcagccgtggtggtggtgactatggtgatcatagtgatggtgataactgtggccgtgtcatggtggtgatagttgtgattctggtagtgacactgatggcagtggcataatgatgatggtcataatggtgctggtgttgttagaagtggtggtgatggtggcagtggtggtgatgatggtgatggtactggtggtggtcataatgatgatggtcatagtggtactagttttggtatagatgcttctggtcatggtgatagtgggagtctcagcaaaggaatatcctgatcatatccaggctatctggtatggtcagtcaagccaagacctcacattataaactaactcttcatggctgggcgcggtggctcacgcctctaatcccagcaatttgggaggctgaggcgggtggatcacctgagatcaggagatcgagaccatcctggccaacatggtgaaatcctgtctctattaaaaatacaaaaattagctgggtgtggtggcacatgcctgtaatcctagttactcgggaggctgaggcaggagaatcacttgaaccaaggagacggaggttgcagtgagccgagatcgtgccactgcactccagcctgataatagagagagattctgactcaaaaaataaataaaataaataaaataaaataactcttcatatcaaataactaacacactagaacatcagcttcataaggagctgcatgaatccccaaggcctgcagaatccccaaggcctagagcagtgtgtggcacacagcagatgctcaataaatacatgttgaatgaatgcaagggaagtgagttcctccttatgatgaacaccacgttacttcatttgatcctcaccccgccctttcaaaattcccatttgatagatgagaaaactgagaccaaaagagatgatgtaaactgcctgaggagtcagcaatggcagagagggagggaggaataatacccaggcctgtcccactcccagtgcaatgctctttcctctacacactttgcagccactctccccgccagcactcagcattacgtagtggtcttgcgcttgggtttaatcatagaaataccgctaataatagtaacaattgctgtttgtaattgtttgagtaaggcttaaatgatcaggaccatggaaattattaataacccaggcccagccatagtgtgggtcgtattaaattgtgttgagatggataacgttagcaataatagtaactgggatcataaattaataacaggagtatttaaattaatgccacactgtcgatacccttagtcataagcagctcaacgctgctgttagtactaatgttgccccttccttcctgccttttatgaattcagctgagaggaaggcaggtctagaaaagcagcgggaggaggagacatcttagaagcagtccctgtctggaaggaatgactcttcagtgatttctgaagaggtgctctttgcctggcctcttatgtccagccatgaaggtggtggctcaccagcattcatgctgaaaaccacaatgatgtctacctgtcctttccaggccagggctgtcccctggactttgtgggttacacaggaaagaaattcacaggacagatatttttttcccccatgaatgaatgaattagcttcagccgatcttggaagtcacctacagactgctagcgtgctctcttcatgagcactgttttttgtttgtttgtttgtttgttttttgagatggagtttttgctctgtggcccaggctggagtgcaatggcgctatttccgctcactgcaacctccgcctcctgggttcaagtgattcttctgtctcagcctcctaagtagctgggactacaggcgtgagccaccacgcgaagctaatttttgtatttttagtagagatgaggtttcactatgttggccaggctggtctcgaactctcgacctcaggtgatccacccgcttcggcctcccaaagtgctgggattacaggcatgtgcctggcccacaagcgctcttgatctcccttttgtttccataactggggagggtagtgagattttttttttttccaggaggaaactgaaatccaaacatggttaagatttgggtgttgggatagactttgcagacacccccatcaactctgtgctccagggtcttgatgtctgggaacgaagaaatggagggaacaggaaaggggtaagcatgggggtgggtggcatgcttttggggttgggaggcatattatttggacttggcaaggtttctagggcaagatgaatttggtcctagcacatggatgggtacacagatatgagtccatttcaccacttttctatttattcccttctacaaaactttcttgaaccctactgtataccaggaattcagagaagaaaccataatccctgcctgcagagctcataagcccatggagacactcacagtctggtgaagtctatattgttgaagatgcatctgtttgtttgttgatgggtgtcagtgtgtgtgtgcactcatgaatgtgtgtgtttgtgtgactgtatacatgtgagggcttatgcagacacgactgtatacatgcatgtgtgaatgtgtacatatgcgcgtttgaatgtccggatcacatatgtgcccgtgtgcatgcctggagaggtgcatgtgtgggacagtcaggtcggcaggagtgcatgagaacggtgtgggcacacgtaagtgcacgatcacacatacaagtgagcttgagagtgtgtattcctgtgcactgtgtgcacacctgtgaccccttcaaacccctcatttgagaatcaaatgatgtcggaatggactccaccttgaatgtcgatggccgaggtaagggcgcctgcgcccctcccctccccctaggcctctgcccagggatctcctgcactgggaaggggaggggtggggatggggtggaggtggggtgatggactgagatgaagggcagggagggcaagcgggcattcttactgatagggggcagttagggagcaaggctccagggagaaggtgaagccagaggcggaggaagatgggtaagagagtgaaccctgtggcgggccgcagccggagaggaacaggaaccgcagtggggacgccctggtccccgggcccacagcatccgggacggacgcgcagtagcgcgggccgggaactgggtaccagggcgggatgggtgagaggctctaagggacaaggcagggagaagcgcagcggggtgcggggaaccgcacgccctccctttgcctctgcttcccaccccgaggcggcagggcgggcgggcgcggttccgggggtgggcgggctgggcggggcggaggcggggccgcagcactggcttcacccagcctctcccgcccgcagccagagcgagccgagccgcggccagctccggcgggcagggggggcgctggagcgcagcgcagcgcagccccatcagtccgcaaagcggaccgagctggaagtcgagcgctgccgcgggaggcgggcgatgggggcaggtgccaccggccgcgccatggacgggccgcgcctgctgctgttgctgcttctgggggtgagtgttagccggagggggcccgctccctttcccgggatcagaactccgagaagagccgggcgccgccaccaaggaaacagaacagagcattggggtcccagatactgagggtgggtggtgggaaaggacctctgatgccgggaccacgaaggagggtctagggttcccggagcgcagaggcgactctccagggtggagatgagggcaagaccggagcacggatgccggtcctcaggtaccgcagggggcggtgggggagctgggaggggtctttcaagagggggcatggggctctccgatgcccaggttcttcggaagaggacactcgaatgccgggatcccgaagggactttcccctcagcatctcggtctctggagagtcgtgggacagaaccaaggcgagagaaggagggggaactggacggggactagagatgagaggggcgagctgggctggggcggggagcccgggacgacgggatggaacaatggaggaggtcggagggactggaggcagaggggacccggcaaggacaatggggaccggccagacaatgggggggaggggcgtcggagggagaggttggggagcgggagagaggttgagaagtgggttagggagggcagaagaggggcgacggcgagggcggcagagagatggaagcagaaggaaaggagacagagcggggcgcggaccctgaagtggtcggggtcccgcctgcccgctgagggacagtgagacgagaagagagagcagaggcttggacatttccagcgcctgtccccgcgctcctgctcgcggcctctcccagtcccggaattggggctgcggatctaaggctgggaggggagtgcccacttcgccggggcgaacccgctcccggggttcccccacggccggcgggctcctccgacgcgcgtgttctcacggcttgaagcagcgcagcggatcgcgagggacggagcgggtgtgcccctacccgggctggcggtggctacgtctcggggtgcagagcgccggggcgcactaggcggggacccttcctggccgcgcgcagctctggctacgcaggcgggaggcggcaggcagggggcgctgcggggcgaggcaagtgcagtccgccgctgcctgcctgcgagtctggggctgcgcgccgctccccacctagctgcgcgacccgagcgccgcgcccaccgcgctccgtgggctcccgcgcctcgaagggtcgggatccggtctgagcctctcctggctctcggtgcaagccgctgggcacctaacgagacgggggcgcccggacgcctcggattctgtagcgcggtatcccgggccaccgactcggcaaaggtcggcgggtcctccgggtggtccgacgagattgtcagatgtggcctgctttatggccatgaaccgaatgccctggaaggtctggcaacggaggaggcgtcttcactctccccgccagcatctttcatcagagcactgcgccccaaattccggctttacagatacggagactgaggctctgagagtttaaacgacttggccaagatctcacagcaagttgggccagagtcgtggctagactccccgacctgattcccagctcggtactcccccaccttttcagggggcagccgctgtcccagctcggggtcacggctgcgtttcccagcagggcggggggggttgacactgtccccagagtccgtcggcggtagagcctgcgggtgaggtgggcagagattctgtccgggtgcgggccccagcccgaaagctcagccccagttccctggagctgtcaggacctgtggctgcgtccggggatttgggagcgaccgcgggcacgtctgctgactaacgccgctggttagagacgctgctcagacgcgggtgggcgagcgtagaccaggagagcggggaggagggaccggatcccagaggggcaacgacttgggctccgggtctgggcaagagcgagggtccccgcgcgaagacccaaggaaggaggggagctgggcgtggaggacctgggcgcttgggaaggtgtaccccgacaggaacctgccgtctgcagcccctgcggctcccgcctccgcctcggcgcgcggctgctcggtctgggatggctgtgcgcggtccgagtttcttcctgggccgcggtgagagagagagggctgaaaccagagcgcgtcccggcgggtcggctggcgggccgcgccggtaatggaggcactttgtcattcagacgtctgtaaccagagccgccgggctggctaatgcgcctaatagggatggaacgagggcagcaaatgggcgtgcgtgagcggccgggctgagctgggtggatggtggatggggaggcagctccgcgggggacgggcccctaccgcactgttccagcccagtctggctcaagcgcctcgcttcttccctgggggaccgcgtggggaggcgggaataatcgcatgtgctgagttcctactaagtgccttgcacttccctggtagtttctcttgaattatttaatccttataaggtcctagcaaggtgaatttagttattcccacttcgcagttgaggaaacagaaccttctagactttcaggcccgagaccaggctcccccagtgagtcagtggtggcgtctttgttggaacccaggatgcttggcctgggatgttctctttcctacatatgccaggctccctcccgccccctaccttctagatcatggaaggagtcgtggctctgagagattaaatcgtgccctatgcctttggccccacacatttagatctgagccccttctccacacgcagaggccctgccccctctcaagtctctatgctacattatcttgggtaattagctcctttcctcccaactcctcccctatccaaagggagtgaggggtatgtgccagtgcctcccctgggtttgcatcgacctcaaaaggccctccaggtgtttgaaaatctctcccatcccatggcggtgaccacggccccattcacttaagagctctttgctgaagctgttggaatggccagggctgattatactgaaacattcgtatggtttcaaatactttcaactgtttcgctgtttctctcttttctctaattaaaaaaaatgaaaattcttaaaagtcaattcatctaaggatccttccaccttagttccttgtaagccttgaaatggccaaaacaaaaagattacaagcgttcttaaaaatgagatgaaatcattctgtcaaatgtgaaatgactaagtgtaacacatacaaatttcagggaaatttatctgtcatccctataaattaatccttttggatctgattttggagcaattagcctgaatgttagtcacccctccctacttggctaaactctcccctcctgcctggggtctccttaagatgagatgcttctttgataactaacatttattaaattcctactgtagaccagacatatttgcataaattatttcacttaattctcccagcaatcctgggcaatagacattatcaacccaatgttttaggtgagaaaaactgaggtttagggaaattaagtaatttaccctaagcaacatactattaagaagcagatctaggattttacaacatagggaacataaaacaaggacaggaaatgcatggttactaattatctggcccctactccaaatgcagtttttaagagaagagagaggacctcaggctgcagcagggagaacaggtttcttggcaggggcatttgcacaaagcccccacaccacccaagaccactgtagacagatctcctcagctgtccagagcccaacaaactggaacacagccaatggccacaaagtagaccctggaggacagaaaagaggggtcccaaagtacataaataccttatttacttgtgtaatacttacagcaatcctatgatgcaggtactgtcatcattacctaattatgacccaggacaagtgtggagccaggattcagagtggcgtgagagctcacagattgtattcagaggcttgcctcctcctggttcagatcctatttacatacctttatattttttattatttttattttatttatttatttatttattttgagacggactgtcactctgccacccaggctggagtgcagtggcacgatctcgactcactgcaacctctgcctcctgggttcaagcgattctcctgcctcagcctcctgagtagctgagactacaggcgcccgccaccacgcctggctaatattttgtatttttagtagagatggggtttcaccatgttaggcaggatggtctcgatctcctgacctcgtgatctgcctgcctcggcctcccaaagtgctgggattacaggcgtaagccaccacgcccggccggcacatgcctttctaccaaggcgagttccacagtttctgaagattcaattagaccttaaatagattagcgtggtgggggaagggttgcttcaggtcacactctggtagcagcaagaagtgacaactgataccttgacaggaagggaggaaacagaaaagctatattaaaaaaaaaaaaaaggctgacaggagaactcaaaaagacaaaagtgtggtaatttgggaaaagaacaaaagagtttccctgtattgcagcccagagtaatcgctggtgtaaatacagagtccctgagtcatgggaagccatgaagctttgctccagagacagggaagggtgcagccaccatggtgaaaagcaaaaatgatgagggcagcaaagcctggcagtctggaatctcggctaaccaacagtcgctctcccagagttctggttaattgaggtcatacagtattttcatgtatttcaactccacgcgtgtatgcattgtgtccctactgcatgccagataccgcatcaggccctggggcaatccagctccctcagggagctgacagtccaatgagggagtctataaagttcaggccagacaaaagcagagagaaccggagaacaggctggatgcgtaacatggcagccccacctaatctgtgagcggtgggtgcaacaggaccacttccttgaggaagtgacatttaagcagagccctaaaggatgaaaagaaatcagaacaggcccttctggaatcttgcctcttgagggaaagcctgcatctgggaccctgaggctcctggtctgcagatgttcccagcactgagtgtgttgctgccctggaggaggtgcggcaacaccaaggttccacctcctctgttgcctgtgcctgtcctgctggtctcatgaggaccacagactccctcctgggttgatccaacctgtctatccccctgactcctctgtttccttccccaccaaaccctgatgaggccgcaggatattttaaaaggctggagggaaaggagtgtcttggccatgatctggccaatgtagaagaagcagaatgcccaaaacaagcttgtaaagcttccctctggtcccacgaccccaaagcccatacttctcagcatcaaatgagggctgcatggtctggagctagcaaagcaggctttggagttttattagacattaagttttttttaaaggaacagaaatataaagcaagcctccaccagccccttcccctggggaatctggtgttaaattgttacatccacgagcaaagatgcttcagtggcaggaacctgactcccctttcccttggttccagccctgttcccagtggccacatgggggagggggaggactggtggctggaaatcaaaccgtggcagggcagggctgctgggtggtgagagcagccactgtcccatcattgataacagttctccctttctctccatcttggtgcgaggcttttgccaaatggctggccttttgccctggcaccaggctgttgccatctctgtagagaaatgaagactcagagggaagatgggcaagcaagacccccagtgtagagtcaggattcaaacccaagaccctggccctctcctttctgctcttgggcatggacatcttccatttattatttaatatgtggaattaaggacctggagtaaggccctgctggcctttgttagaaaaaggccctcctctgggtagatacaacccagcaggtgcaaagcttagcaaatggagtttgggataggtttcagctctacttgccccgttggctgggagccctgtgcaagctacaacctgtccaaccattcatgacatccctgttggtaggccctccgctgggcctctggccaccttccccatgtggtatatccttgggattccaggagttgctgtaaccccaggatgaactttgcagaaggtcagcagctgaagctctgacctcacacccccagcagcctgcacgggcacactgtccctcacttgcctttcccctgtcagctttgatgttcctaacgcctccctggtgagctcatcccagcccaggtggttctaatagaaggcagtgggaggagggtgtttgattccccggaagaaccccccccaacccaccccagctttctcttgccagtctgaccctccgatctccctccatccaggtgtcccttggaggtgccaaggaggcatgccccacaggcctgtacacacacagcggtgagtgctgcaaagcctgcaacctgggcgagggtgtggcccagccttgtggagccaaccagaccgtgtgtgagccctgcctggacagtgagtagagggtggcgggcaggaggaggggagaagaatgggagggaggagaggggtgaaagggaggggcgctggggagaagcatgcccagtagaggccttataagaccaccactgtaaggtcatcagaagtgggtctgacccagtgtaggaggcgcttctcccagattcgagaagctgagaatggagaagggaagtgtgcagagggaggaggggaaccccatgggggatctccaaggggtgcccattcccagctctggagaaggcagaggcttggtagaagagtgtggctgggcagggaggagtagctgatgctaagaccagctaaaaatatcatctgcactgcaaaatcaatggctgccacttatccccggtgtgtttgggggaagggagaggaggatcaaatcctggctgccctgaaggctgaccttgggggatcctgggggtgtggctgttcctccctacaggccaactcttctccagctttgaccaggaagcagagttttcccgaggcagcagggatgggggtcagagcgccatgaagacgtccttactgtggggtgacagaggggaggggagacggggagctgtgcccattcctgcctgggatttcttccttccttccttccttccttccttccttccttccttccttccttccttcctttctctctctctctttctttacctttctttcctttctttcctttccttccttccttccttccttcaacagagttttgctctgttgcccaggttgggagtgcaatggcatgatctcaactcactgcaacctccacctcctggtttcaagtgattctcatgcctcagcctcctgagtagctgggactacgggtgcatgcatgccaccatgcctggctaattcttgtatttgtagtagagatggggttttaccatgtggaccaggctggtctcaaacttctggcctcaagtgatccacctgccttagcctcccaaagtgttgggattagaggcgtgagccaccgtgctcgaccctgcctgggatttctttcaggaggggagagaatctcatcttcctgggctggtgggtctgggccccttggccccagtcttgtccagggtctgaattccctcatgcttttgagtcaggagtctcggtccctgatcggtgcccccagtcctcagttgctgcctttgggccgtgggctccctgcccttttcctgactccctgccttctacctggcactcgatgcccacctggagggctcgagggaaccatactcagattattctttaatccggctgggaataaggggatagagctggggcctctgaacccacctgcggacctagtgttacctctggatgtcccccctgagtctatctgtcctccaggcaaccccaactcttggtgttccccagacacactgttttcccatctctgtgcttgtggatcctgtaacaccattccccagccaagaaatgcctgggcgtatgtgtggaggtgggacatcctccaatgcctttgccgtcttgcttcatggccacctgctctggccctggcctaacagggtttccattccagggcgggggtggccaaccatcagctatcccagaacctccaaatctgcctctcttgcttcctagactccagcccaggactctcctcccaggacctaaatgatgggaaccctttcccttcagtcaaaggaccttcagcaggaggtggggcggaggacaccaggagagggaagttccagaatctctggaagggaagggaggcaggcagagaggtggctttgagaatcctcccttccacttcctccctcccctccattttcccctccttccctgtctccccctcctccacctccagctgcattaacaggctgcctttacaagcccactttatgggacggagaccccagcggactttccctctacccttaaaacgtttccacaaggaaacctattaagcccctgccttcattctctgccaaaaaagaccacatttttcacaccacctaaaaccctctcccaggagttttctgctaattttctgtgttttgccatgagcaggcttctcctcttcccctcctgtgtgactagacttaccctccatcacacgccagccagccaggaccctcttgtttgtatagctcagacatcctgcctttgctgtttgtgtttggacgttctttctgctgtctgaccatattcctacctccaaagttcaatgtcctcatcgctctccacccccatggggcccaatctttataggatcccaactacgtgccaaagctttatggctgaatttcatttattcctcactacaaccctgtgactgcagatattgctccttatttttacagagaaagaaaaagctcagagaggttaagtaaaacacccaaagtcacacagcttataagcgatggaaatggattttgaatccagatctgcctgctcctaggaaaagggacacagggttcctctgtcagaattcacttgaaactgaagtctccctccaggcccttcttcctgggtcttttcttctctcctctaccctttttctttctttctttcttttttttttttttttttttttgacagcgtctcactctgtcacccaggctggagtgcactggtgcagtcttggctcactgtaacctctgcctcccatgctcaagcaatcctcccacctcagcttcccgagtagctgggattacagacgtgcaccactacacccagctaatttttgtattttttatagagatggggttttgccatgttggccaggctggtcttgaactcctggcctcaagtgatctgctcgccttggcctcccaaagtgctgggattacaggagtgagccaccacgcccagcctttgtccccagttctgcccctttcacttctctctggcttttccttctttgcctcctcatccccccaccacacccccgaagccagtgaccccttgctccatcttgtctctgatgcctttgaataatgttgagacccccctacaggcctcagtttccccctaatggcgctttagcctttctgcttctgcttccacattctgaacaatctgtccttccctggttctcaggttcctaaatctatgctcttcctgtccttggagcaaggataggtcctgccagatccagggtggcacagagttccccacccaaagctggaaggggtgaagaagatctggccctgttccttcccctccctgtacaaggaggcaaggaccctggcgtgcccagcctccttctccttattctggagtgcacatccagtaattaagaaaacatgagtgaagaatgagcttggacatctcccttgcatcctggccgaaagggcagacgacgcatgtgcagatctcaaaagggtgatcatatagttgtgcagcttgtgtactgctcaacaatatccatctgagagagtgagtgtgggctaagagccagctctctagcttcagtggctcctgccttacctgagccctcttgcctgcaggtccgtccccaccctcaggatccaagcccttcagcagcatgggggtagtgccatgggtgggaaattctgctgtctaaccccggtcactcccatttaggctgcatctgagcccacacctgtgtggagaggaactgaaggcagatgaggcaggaggctccctaggggaaggcctaccttgcctggaccgggttagcagcccagctctggcccgcggggagggctgggtgggaaccacgttcagattattccttaatcatgctgggaacatagtacaggcctgggaactctcaaagagaatttgccaagaaacttagcggcaccagctgggttatgccggaaagcctcccggccggccagtgcttctggagcctggaggatgcggctccgggcctcctccccctttcccagttggctgccaccaactttcacaggctaggggtcagggtcccttggaagagggtgggagccgatgagaaggctgaaggaggaagtcagcgtcctggcaggcaataggggagggagagactccagctcctgcgtcccgggtgcccaaaagagcagacgactaaatctggtgtccgctgcgctcaggcgtgacgttctccgacgtggtgagcgcgaccgagccgtgcaagccgtgcaccgagtgcgtggggctccagagcatgtcggcgccgtgcgtggaggccgacgacgccgtgtgccgctgcgcctacggctactaccaggatgagacgactgggcgctgcgaggcgtgccgcgtgtgcgaggcgggctcgggcctcgtgttctcctgccaggacaagcagaacaccgtgtgcgaggagtgccccgacggcacgtattccgacgaggccaaccacgtggacccgtgcctgccctgcaccgtgtgcgaggacaccgagcgccagctccgcgagtgcacacgctgggccgacgccgagtgcgagggtgagtgcggttcggggggcggggggagtgggggtgcgggggtgggctgggggcataaggaagggcgctctctggaggtcgacaaggaccctgcctggcctgctggggcagcttggtgaccttgaggcagcgtgcaccttccctgagcttcagtcctttcctggtaacctaagggaggaggtcattccccatcctgtctcagcaaagaacccctctctgtgttaccttctttgggctgtttggaaagtgggcgttctcagcgtcccaggccgcgggtactacattgtaactcatcctccgggacgcatttctctgtggcttcccgctagtgattagctgaacagcaagcagctcgaaggtggccactacccccagggcacagaacgggagaggtctgatccatgaggcaggctttctgaactggaagagcagcttgaggaccctcaggagctgggaccctttgactctgagccctggtctaggtccatggtgggttttggctctgggacctgagatggaacccaccctgtccttgactgacgttagggagtccactcctgtctctgggcctcggtttcctcactggtcatatggctgccagggttgttgcgggttagggaatacagtggggctggcccacttcagcttgccctgtctaggggaggggtcaaccgtgttccgcagtttagtgaaggatgaggggcatgcagggaacactaaggaggggctctgtggaagaagaaggaggggaggggcagacctggggctcaaaagcccggggacaaggcagtgcatgctcgtggctgtcagctccagggatggatgggagctgggcgtgcccaccttagccaagcacaggccccaaggagatggggtggttcttgggatgggagaaggaagccccgtgggagccagggcagagctgttttggtctctggttggtgacgtccgtctcaggggagactggtgggcttttccacttcggggagaggctggcagtgcctttacatcctgtccatcatcctgtggccatgcacacattgagctatttccctttgagaactaacctgcatcctcaggttgcctttaccctgagcaggcaatatagtacctccttcagtgagcccccagtttgatgggagagatagccttcgcccagtctaatgagagagacgtggtcccagcacttagtccccagctgaaggagagatagctctcactttagagatcccccattctgatggaggcagcagagcttctgcctcagttagcacccagatctcctgcccctggggaccctccagtctgataggggctccaacccacacctgccttccaagtcctgccatctctggctttaggagctcaggatggggagggctgttacgctgggctaaggccaggttgagctcaaagcttcctgccttggagaaggaatgaggagtaggatgtggtggttctgttggcaattgccctgggccaggagacaggcaagtggcatcaggcgccaggcagagcgcaggaagggtttcagcagccaggcatcaggcaagcaggcagctcatttctgtaggcaagtccagaccagccagctgggggcggggcggggggacttgggggcgctgctagagcaaagaaaggtggtgactgtgggaggagcaggctttgtcttttggggcattcacagattcctctcagataccagcccactttcccagccaccccgaaggaggagggtgctcctgagggagtgttcataccagaccctgttcccctttcagcttcaggctctgaagggttaaatgtcagctctgggacaagagaccatttcaggaaatggaatttgattcttggttttgttgccccctcccctccagcgtaccatactttccccgcatttacttacgtttcaggtgtcaacatggtgactcacccaccctcagggcagaagggctacccgctgccccagtgaaattcggtttgaatagggataacctggtccctccatgcagcccggaaatggctgtcaggacctgccaagggcttagtaggttggaatgctagtggacgtggccacatctggatctcatccccccgcccccgtcagaggggattggagagatgagggcagctccccaagagtcagtgccgcctctggtctggccacgccttgctaccctcccagccttcccctaccatgctctgatctcggtgatggtctcattcattgggcacccggacatgtacactccttcaccctctggcttggggtcagtctgagctgagctgtgtctccagcctctggacttgggctgccccccagcttgcccagtcccctggcagagcaagagaagaccctccccagtccaatgctccacctggggctgccagaagacagggctctgtctccttcactacctctggcccctcccaggacggagacggggaagggtggtttgggtgacagatggcagcccctcactgctggcagccagatggattctagattcacatctgggggctttgcccctcagaaggtgctgaaaacgggcctttgaagcatttcatcttgagtggaagaggccagaagatgggtggcagcttctactcctgcttgggtgggcaaagtgggggctgggagggcagagctgggagccagttaccctccccttcaccccattggcatgtcctgcctgctttccctccctgccccaggcgtgggaagtgaggagggacggggtaggcaacattgcccagacaagtatccccaggccgtccagagcccacaacccctagcactgcccctggctgtgtggcagaatggaaaatcccacccactggtgccaggaagggctgggtcccctgccagggaggctggcaatgcccagctagcatgagagggtctaggtgggtggcaagtcacagtctccccccgccagctgaggcattgagctggacctgcctcatgggccccttctccactggctctctgcttcctgaccaaggagggttggggctacctgatgctgtcatctctggttggcaggatcaggctaggtgggagccaggcaagacaggaaacagaggctggccactgtccaagggctggctggagggaggcaatccagctgcccccgcacccctcctttccacccaagcctagagcctgagacatgaggtcaaaaagtcggggagtgctctcagggaggtggtgtgggggaagcacctctctgaccagacctgtgtaccctcttctttccttaggacaggagtgactagggtcatcaaggacaagctggggccagagagacatttcccagagtgactccagctcaaggcctccctgtggtcaggcttctttgtgtgtttgctcctagataggcctctctaggtactcaggaggtggaatagaattccaggaccatagccccagatggaagggagcttagagactgtctctcttaatagccccattagataaataaggaaatcaaggttctgagagaaaagggggctgggccagagtcacccagcaagtcagtggcgaagctgaaggagatgcagctctgtgggcccacaggccttgctctttagcatcatgacatcatgcacgcaatcccagctgtgcataacagctgggcacaagagcacctggagccagggcggggacacaggaagaacacggcagtgggttagagctaaaagggaggagtgggggaagtgggtcctcactcctgtggccttttctcccagagatccctggccgttggattacacggtccacacccccagagggctcggacagcacagcccccagcacccaggagcctgaggcacctccagaacaagacctcatagccagcacggtggcaggtgtggtgaccacagtgatgggcagctcccagcccgtggtgacccgaggcaccaccgacaacctcatccctgtctattgctccatcctggctgctgtggttgtgggccttgtggcctacatagccttcaagaggtaagagagggcacggtggcgacagagaggggagatgtttgccctcaaggaagactttgctgtgaccttgacctgaaaacatacacacccttttaactcaaccccaaaccaagctcatcctcactcatcatctgccgccccactccagggtgcagcaggtcagcaggaggtgaggggagaggatccacctgtcctgtcctgtcctctcctgccctgtcctggctccagcccctcccactcccatgccgcaccactccctgactccccacccccaactgcttgtgtcctcatccccaacctccttcaccccacagtcacctgcgtgtgcatatgtctcttccccttcgcttgtcacactgggaatgctgtggcacccacatccaggaatccaggatgtgcacgaactcccagaaggcattttaaagctttaaatgcattttccattctttctaaaaaaaaaaaaaaaaaatcatcaaagtaacacatccgtgtttaggaaaatgcaaacaagaccaatatctttcaaagcaaaaagtaaaagcccccttttatctccccaaatcctacttctctccttattggaatctgtttgaaatggatccttcccaactattttctgtgtgtctttttttataaacatgtatataaaccttttataattacatgtaaacatggagggctttttaggcatcagtgagatcacattgtacatattctacagcttacttttttcactcagtctccctcaggagacctttcctcaggaatgtagattagctgatcatttgtaaccactcattcaatagtatggatggatggtaatttatttagccagtccccattgatggacatttgttttttttttttttccagttttttgttattgcttataattgcagaggaaatccttttatatgtcactgcccacatgtgggagtattttagaagggtagattgggagaagaggagttcctgagcagtcacttttgctgcactgctcattccaggaacatttactgaacacttacagagggcccctctgccctcatggagctttcagggtaggtgggggcagatgtgcaaagaggagccttagatggtggggtggcggttataattgggcacccgccatgcccctggccctcacacggcagagcacagatactcagctgcatcggccactacagcccctcgccccctgaaacctggcctgtcctctggctccaggtggaacagctgcaagcagaacaagcaaggagccaacagccggccagtgaaccagacgcccccaccagagggagaaaaactccacagcgacagtggcatctccgtggacagccagagcctgcatgaccagcagccccacacgcagacagcctcgggccagggtgagcagcggcccgctggggagctgaggcggagctgaggctgaggaaacagaagcaattaagattagactccaggaaggactgtcgggggggcggcagggctggctcagcggtgcccctgtagatggatggagaggctggccgaggggaatgggagggagaggtcctctctagaggaacgacttgggaaatggaggcttttacaagttggagcatccagactcatcaagctaattgtcccccctgggggctaattattgcccaaagtagctgcaattagcctcttgccctggacttctggggaacaagtagttaagtgtgtaccctaattagtggcccatagcccagctccgggacacttgctgtagttgtctagaactgagaagccctatctcctcctctgccatgattaattgctgggggggaagagaggagggatggggatagggattgggctggagtgacaggaggaagggacaacgagtccccccaggtgccttcacttcctggtgccccacccaggaccttgtcttggccccaggcctccagatggggaggagcactgcctcggcccttcttgggtctcaccccagtgcccactgttggggaaaggagttcaggggtaggacctgactctcctctggtttctctgcagccctcaagggtgacggaggcctctacagcagcctgcccccagccaagcgggaggaggtggagaagcttctcaacggctctgcgggggacacctggcggcacctggcgggcgagctgggctaccagcccgagcacatagactcctttacccatgaggcctgccccgttcgcgccctgcttgcaagctgggccacccaggacagcgccacactggacgccctcctggccgccctgcgccgcatccagcgagccgacctcgtggagagtctgtgcagtgagtccactgccacatccccggtgtgagcccaaccggggagcccccgccccgccccacattccgacaaccgatgctccagccaacccctgtggagcccgcacccccaccctttggggggggcccgcctggcagaactgagctcctctgggcaggacctcagagtccaggccccaaaaccacagccctgtcagtgcagcccgtgtggccccttcacttctgaccacacttcctgtccagagagagaagtgcccctgctgcctccccaaccctgcccctgccccgtcaccatctcaggccacctgcccccttctcccacactgctaggtgggccagcccctcccaccacagcaggtgtcatatatggggggccaacaccagggatggtactagggggaagtgacaaggccccagagactcagagggaggaatcgaggaaccagagccatggactctacactgtgaacttggggaacaagggtggcatcccagtggcctcaaccctccctcagcccctcttgccccccaccccagcctaagatgaagaggatcggaggcttgtcagagctgggaggggttttcgaagctcagcccacccccctcattttggatataggtcagtgaggcccagggagaggccatgattcgcccaaagccagacagcaacggggaggccaagtgcaggctggcaccgccttctctaaatgaggggcctcaggtttgcctgagggcgaggggagggtggcaggtgaccttctgggaaatggcttgaagccaagtcagctttgccttccacgctgtctccagacccccaccccttccccactgcctgcccacccgtggagatgggatgcttgcctagggcctggtccatgatggagtcaggtttggggttcgtggaaagggtgctgcttccctctgcctgtccctctcaggcatgcctgtgtgacatcagtggcatggctccagtctgctgccctccatcccgacatggacccggagctaacactggcccctagaatcagcctaggggtcagggaccaaggacccctcaccttgcaacacacagacacacgcacacacacacacaggaggagaaatctcacttttctccatgagttttttctcttgggctgagactggatactgcccggggcagctgccagagaagcatcggagggaattgaggtctgctcggccgtcttcactcgcccccgggtttggcgggccaaggactgccgaccgaggctggagctggcgtctgtcttcaagggcttacacgtggaggaatgctcccccatcctccccttccctgcaaacatggggttggctgggcccagaaggttgtgatgaagaaaagtgggccagtgtgggaatgcggcaagaaggaattgacttcgactgtgacctgtggggatttctcccagctctagacaaccctgcaaaggactgttttttcctgagcttggccagaagggggccatgaggcctcagtggactttccaccccctccctggcctgttctgttttgcctgaagttggagtgagtgtggctcccctctatttagcatgacaagccccaggcaggctgtgcgctgacaaccaccgctccccagcccagggttcccccagccctgtggaagggactaggagcactgtagtaaatggcaattctttgacctcaacctgtgatgaggggaggaaactcacctgctggcccctcacctgggcacctggggagtgggacagagtctgggtgtatttattttcctccccagcaggtggggagggggtttgggggcttgcaagtatgttttagcatgtgtttggttctggggcccctttttactccccttgagctgagatggaacccttttggcccccgagctgggggccatgagctccagacccccagcaaccctcctatcacctcccctccttgcctcctgtgtaatcatttcttgggccctcctgaaacttacacacaaaacgttaagtgatgaacattaaatagcaaagaaagaaaaatagtacaaagagattttctggaaatacacatggtttgaattgtttgggattgggtgtgtggcagggacccaggtataatttccaattcggtcaattcctgccctcttttcccccacaccaaaaggggaagttttaacagaaatccagtaagttcccatgtatcactatggggtgaggtggggaaggagaaggggccctttgctcccagatcttggagagggaaagtgaaaatggccacgcaggaagctagccagctgtgaacttgaccagatgtcagaagtgaaactgaccacaggcaagtcagaggctcgccaggagggccaggtcacaaccccacagctcccagccacccacgtggcctgggagacacacacacacacatacacaccacagagagagagagagagaatctggctccagatggcctagcaggaggcattcggcaggcctggcctggagttaggcaggcaggcccctcccttgtagctctcgtgggcaggtcctaacccaggctcctgacagcctggcttcgagccccgcctggcccaggcctgggagctcccagggctgtagggctcctggccctgggcctgtgcctgtctctgaggctcagcctcagcccctgctggttgtttggccaagtcctccggggagactggcttgtggtcactgaggaagacaaagggaggcttgctcttccagtaaaaacagcaaacaagcctgcctgacctccagatccagggagaagggccagccaggcccagccagagtcagacaagggtggaggggaggttctctgtcttccattcccctcctacgcccccagactgtgaggggtgtaaggaagatggaagatgttgcgggagggattcagagtaggtaagagaaataatcctggtacttggaaaatcagtgtgatgggaaagacaatctctgtcttgagcgaggctcccatctaatgaaggagacagtcccagaattgaggatattctaacctgatgaaggaggcacacctcctatcctaagggtgcccccatgctgatggggaaatatactctttgacctaagagtggctctccactctgccccccactcttgtctggtgggggaaaaccagatgctgtcctgtgaaataaggagaactcaaatccctgccttcaccagccttacattcttgagggagctagagcagaccggccctctatggtgtgtactgctataatagtggggggatcctaagcaagacccacccacaccaggggtcagggaaggtttgccagagaagggatatggaagctgagtctttaaggatgagtggagttaactagacaggtcggggggagagtgcttctggcagaagaaccagctcagcaaaggccctggagggcgccagcacagagcacacgtggcctggggaggctctagggcccagagcccagagagtgagtaggaaggtgatcagtggggcctcagcggggagggcttgtgaagagacacactagggggtctggactacattcttggaacactggggagccactggggggttttaagtataggagtgccatagacagacttgtactttattattgattattttttattttttaaaatttgagacaaggtctggctctgtcacccaggctggagtgcagtggtgtaatctcagctcactgcagcctcaacttcccaggctcaagtgatgctcccacctcagcctccagagtagctgggagaacaggcacacgccaccacacccagctaattattttgtattttttgtacagacggggtttcgccatgttgccccggctgcttttgaaattctcggctcaagccatcctcctgccttggcctcccaaagtgctgggattacaggtgtgagccaccacacccagcccagacttgtactttagaaagcactagctccagctgcagagtggagggtgctgggtggagcagggtgggctgagaggtgggagtcagtggcggcctgaaatcaaggaggaagcataggggtggtgagaaaaggggcttttaaagagctcctcagagccaggggcatggggtggtgggtagggaagtgactgacaccgtccaggggctcgtaggaacaggagggctaagaaacttaaagacgtttgatatggtttggctttgtgtccccacccaaatctcatctcaaattgtaatcccacgtgttgaggaagggacctggtggggagtgattggctcatgggggtgttttcccccaagctgctcctgtgatggtgagtgagttctcacaaaatctgatggtttaaaagtgtgtgggccaggcgtggtggctcacacctgtaatcccagcactttgggaggccaaggcaggtggatcacctgaggtcaggagtttgagaccagcctgggcaacctggtgataccccatctctactataatacaaaatttagccaggcctggtggcgtgagcctgtaatcccagctactctggaggctgaggcaggagaattgctcgagcctgggaggcggaagttgcagtgagtcgagaacgcgccactgcactctagcctgggtgacagagctacactccgtctcaaaaaaaggaaaacaacaacaacaacaaaaaaactgtatggcactttcccccaccgccctcgctcttccgctgccgtgtgaagaaggtgcctgcttccctttcgccttccgccatgattgtaaatttcctgaggtctcccagccatatggaactgtgagtcaattaaaccttcttcttggttggatgcagtggctcacgcctgtaatcccagcactttgggatgctgaggcaaatggatcgtttgaggtcaggagtttgagaccagcctggctgacatcgtgaaaccccatctctactaaaaatacaaaaattagccgggcgtggtggcacatgcctgtaatcccagctactcgggaggctgaggtgggagaatcacttgaacccgggaggcagaggttgcagtgagctgagatcgcaccattgcactccagtctgggtgacagagcaagactctgcctccaaataaataaataaataaacctttctctttataaattacccagtgtcaggtagttctttataacagtgtaaaaatgaactaatacaacatggtacccaagattccctctgcagcacccccaccatcacattgtgtagaaatcctctttgcctccttccatttttccttctctgattccctctcaacagctaaaatgcttcaccagctttcagcttaccgtttttttgttttgttttgttttgtttttttaaagagatagggtctccctatgttgaccaggctggtctcaaactcctggcctcaagcaatcctcccatcttggcttcccaaaatgctgggattacaggcatgagccactgcacccagcctgcttaccaatcttagtgtggccttggaggctgtgtggaagctaagtgcttaaggatgagtgaagttaacaaatggggagaggagagtggttctggcagaggacccaactcagcaaaggccctggagggcgggagcacagagcacaggggctcccccagactcactgccttgttgtagccatcctcctcctcctcctcacccccaagtcaggcctcttataattcttcaagtgttgctggtccctcaagccacagggcctttgcacacgctatcccttctggctggaaggacactctttcaaaccctttttcccaagtttcctcagcccaatactttcttagggcagccctcactgaactctgtgccgaaatcaggtttcagagcacaccacgttcactgcctttctttagaccacttcatctctcttcgtaattaggcacccgtctgagtgattatttgattactgtaaactccagaaaacctgagacagggtctggttttgctcatcttctaatccttagcaccttgcctggcatatagttggcactcataaaattatgttaaataaatgaatgagtgtggtctgaggcaactccatccaataaaaatatgatgcaagtgacatatatgtaatttaaaatttttagtagccacattacacaagtgaaaagaaacaggtgaacttaataatatattttatttagcacaataaatccaaaatgttatttcaacatgattgtatacatatcgaaatattatatataatatttaaaatattaagatatatatataattttttttttagagttgggggtgtctttctatgttgtctgggctggtctcgaactcctggcctctagggatcttcctgcctaggcctcccagagtgctggaattataggcatgagccacccacgcctggctcaatatttttaaattattaataaaaaattttacatttttggtcccaccaagttttcaaaatccagtgtgtattttattcttgtagcacatctccatttggactagccccatttcaaggaaccatcctaggcagctcagctcgtgcctcccagagcagggactcatgctgagccctcagtgggctccgcggcagatgatggatactcccttgcttcttcctgtgtcatccatctccttgggcttgaggactatagttctcccctcctcctctccactgctaccccaaagcctctctcctctgggcccaggcctggaggctgtctctgtctctctcaccctccaggctggaggatccatgagccttcatctctgctggcccatcagggtcccatctcttcccctagtgcctccctctgctctttcatccagggcagtgaagcagcgatgagacttggaacaatgtgaaatgcctcttcatccagcggggaggggcgtgggggtccgctgagcctgtaaccctgtgctctaggggaagaaggggctgggccagctctggggtcaagagaagacacttcccatgatgctcgggctgggggtctgctgaccatatgcctgggggaggctgcttctctgataatgcaaagcagattcctcccagctctgcggcagctggtgggcagaaggccaggggacaaggctgggcccccaggcatctggatacagaagagctgaggcaaggagggctccttcgtcagcctcctgccccccaccttacactcctcccaacacccctgcccccacactgaccctccccagctacaacaggctcccctccacagtcttcctgccctgggccatgcccgggctccagatctctgtctagctccatcaaagtggggggcggacattctcagcacatacccttagggtctccagcacaacacccccattcagatcatgcccacacgcagggtgatcccacccaggctcaactggaagtcagggttttgcacaataatccccactccccaattcccatgatactccagctggggcatctacctattccagccttccaaccatccagggttgagtccaaaaacatttcccaaaggctccatcatgcaagaacattcaggaacattccagctctcacctcccatccctcacagggcactcagtcctgccctcttcccacagtatccgggaacttccccatccctctgctcccttcccgacaatccctgctctagccgtttccagcaacattcccaaagggcttctgggagacgtagatttgggtctcctccctgggctgggactgctccctttggaaaagcttgggaatgttcctaccccctgctctttgtattctagagactcatagaaattgggggtccttctgactcaccctgagaagcccttggagtccacattctgaagccccagctccaccccagggcctaaggctttcaacagtagtccagatggttcaccttctaccctgcggaccttgggatgcccgcagtctgcacgggatgtgcgggccaagggcacagaactgcccggcttccattcatcagtgttaaaggccccaccaccacctctgggaagatgagcttgagggctctgatgcggccacctagcagctcctctctcctcaccctctacaccagttaggattttttgtgttgcaagagagagaaaacccaacagagggtggtgagagggaacttactgtccgtcagaagtgaaaagggagtagggctggctctaggcacagcttgattcagaggctcaaacaacacccccagaacccggttgctctctttccacttcggcctctacttcctcagataggctgtctccttgtggggacaagagggccgcaaagcgtcaggttcaaggcggtggggaagagaccccctcagtcctaataatcccagcaaaggtctccaggtgtccctggtactgactggcccatccctgtggcttggaaatgtgatcatcagttggctaaggtggaggtcccacgctctgtccctacggcaaggatatcatcctacctgaagcatgggactgagagtgggggaaattgaggtaccatccccaaaaacaggccacttaaaaacagcaaatgtggcctccagtctagattgacagttgggcttcttcgacaggcagcctgagcaagcctcctcccccagaccaaagtgtgagtttccactaaggatcactaggaaacaataatatattacgacgcaagagtgtccaggacgcactggggttccgaagagggaggaagttttctggctgcagggacccaggaagaattctgcaggggagccgtttgaatccagcctggagggatggacaggatccgggttgtggggctggaaaggagctggggaggatgtctcaggcggaggaaagagctggagcaaaagcacaagaatgggggtgggaggttagtgcttcatgttctgggggaaccagcagtgaggaggaaaacagggaagcaatccagggaattgtaaggagggagaatgactagccttggcaccagatcagatgggaagatagtgaggcagagaggagtctagatgactcccagccttaagccttggcaatggacatgatggagctgttcataggtggggagctcaggggaggagggtttcttgcaagaggaggaattccatgtggagttggagaagcctgtgggacatcggggggaaagtcaggagacactggttatactctagtcccccttatccacttccctttcactttccccagtttcagtgacctgtggtcaaccgcagtctcgaaataggaaatggacaattccagaaataaacagtttgtacattttaaattgcacctcgttctgagtatcgtgatgaaaatctcacgctatctggctccattctgcttgggacgtgaatcctcctttagtccagcatacccatgctgtgaacactacccacccactagtcacttcgtctcagttatcagatcaaaaaagcataggatatataggattcagtgctgttcacgggttcaggaatccactgggggtcttggataagaccatggataagggagtggggacagccgtacttgtcacaagctcagggaaattccagggttacagtggaaggtttttgaatcatctgcaagccactgcgtgaggttcctatgggttaggcccttggacaggcctgctaaggtgaccagaggagaagaggaggcagataactgagaagggcttgtcagtgagttgggaggcctggatcttaccccatcaagaaagcctaaggtagtagcaagctttcaggaggaggcagccggtgatccccagtgagggaccgcagggaggcccaggaggcagagggctggacaggccactggactggcctggaagaaggctgcagagacagagggcagtggccagaggagagagtggcaggtgagacagtggagatgcccctgtataactctccttctaggagctttgctgagaagggaaggagagaggctttccctgggatgaggaggagctttattatagggatagggagggaggatgtgatctgtgggatcagggagctttagattttaaaactgggcctggttcaaccatcccagcacctctgtgaaattccacagctaacacccagtgaggtggctcctgcttatgatcttagcattttgggaggctgaggcaggcagatcacttgaggccaggagtttgagaccagcctggccaacacagtgaaactccgtctctactaaaaatacaaaaaattagtcaggcgtggtagtgcatgcctgtattcccagctacttgggaggctgaggcacaagaatcacttgaacccaggaggcagagattgcagtgagccgagatcatgccactgtactccagcctggttgacagagtgagactgtcgcaaaaaaaaaaaaaaggaagaaattgcacagatttggtcctcagttcctggccctcttgttgccgcacccccctccccacctgaccccggcctgctttagtcccctgtcaaccatcacacaccactggtgcagggggctaattatcagggactcaaatggcagacaggaacctgtgccttgtctcaaggagctcaaagttcaggtaaaatgaagaaagaaattgtctaaaaatcaaaatgggattgggctctgccagggaaccacatcctagatctccggtccaaatgctacctcttcgatactttaatgagcagccattaggccctgtgagtgagacccccacaccatctcttccagggcggtgattggctgaaagccagggcgggacagaagaagctgccagaatcacatcacattaggttcatgcaaaagccacctcagcagctctgggtacccagcccccacttcctggggtaacacatgggctgggcacgtgcccagagactgccacatgcctatcaggctggggcctgcctcacgcctctccagggaggttgccagaagccctggagctgggtaaaccccaacagtgactcaggtgaggggtggaggctggggcaagaaggctgcagcccaggccagattgtggtcccccctccccccacctggtgcctggtgagctgagggacagggcgggaacatggcaggctggcagcaccagaaacaggctgggcgccctgtctgggagcacggtaatgtcccccttcgcaggaggagagtctgcttggcagactggcatagacactgccttaagcagatgcaaactcagagaggatgcctgatgccagccaggcagccctccatcagcaaagaccctgcatccagggcaaagatgcagccaccgtccagtccaggaggcgggatctgccctctcagcttgcagcaaggagcaagtagagggattcatagcctgattccctggactttgggtgcagagtctgggagaagaggccctgcacaccctaggggatgcgagggggctgggagctaaccagagtcactaagcagctgaaccaagcaacacagctccctgttccctggggcctcctgagacggcggatgacatttgcccagcatttgaaagtttacaaagcactttcacagccataattccatgtgatcgtttcattagttctgccagagaggcattataggacccactttatggatgagacaactgaaacccagaggtttgcccaaggccacctgagtaaggggctgagccaacctgggagccacatctgccgccctagcaccctggtctcgtttcccccgtgccaggttgactgccaccaacatgggggtggaggtagaggtggttgcactggggatggggtgaagatgaagggtgggggcaagggtgggcatctggagaggtggggagcctggagtgggaccggaattcaattcagagaggaggatgcagggtgaagataaacggaccccatttcaatgttgccaaaagctcgttcccctcccaatatcgcctgcccactcccacaaagagtgacaggaacagctggagcccacaagggagagaagaaaggggatcccagttcagagcctggcgtcttaaccttaatgctgcccccggcaccccctcccctccactcccagcccctcaccccaggctgcaggaggctggtgccgccaggagcctggcacagggccacataggctaggcctggtggagaggggcagaacagcatgggcatgctgcagactgattcctacccacccccggggcccctgcctggacccctcagcccatccccaggtgcccaccactctgcccatccgtggagtttccccagagcctgggacctcagtttgggattcggaaaagtctgccttttcaagacaccccggcccttccaactttgggctcagctggatcccactggttagtccctcaggtaccctccccgggtccccgaaatgatgtcttccaggcccaccttctagaacactcttcccacctttgctgctggttattttggcttcataccccaagggatatgaatggaaagaatgtggccttggccgggtgcagtggctcacacctgtaatcccagcactttgggaggctgaggcaggtgaatcacttgagcccaggagatcgagactagcctggccaacatggcaaaacctggtctctactaaaaatactaaaaattagcctggtgtgatggcacatgcctgtggtcccagctatttaggaggctgaggtgagaggattgcttgagcctgggaggcagaggttgcaatgagccgagatctagacactacattccagtctgggcaacaaagtgagaccccacctcaaaaaaaaaaaaaagaatgtggtttttagagtcacacaatcctgggctcaaacccaggctctgccacttactagctctgggatcttgggcaaggcagtcacatatcctctcagagcctttgtttcctcagctgtaaaatggggatcaatagcagcccttcggaaatttgctgcaaaactgaaaactagtatgtgtgaggttagatctaacacaaccctgggtcacagtgaatacctgagtcatcatcatctccaccctggtgtcagaggccctcataggaaccccagcctgccagtccagcctgtctccctccctgcggccagtgtgcgcaactcatgttccctgacgtcggcctacattttcccatttggagcctttgctgcagagcctgttgcctgtggggccctctccacagacctatctgtagccacatccctttgccacctcttcctggaagcctttccagatttctctctcacattgcctacaggacttccttagcactttgcatagcaagggctctgctccactttgggtctttactttacatcttgtattaaactataagcagattcatctctgcagcctccctgtccccccgcctgcctccccgctaccccggccccatgctctgactgtcgtcctcttccacgacagtgaggtcagtccacctccctcctgcccactcagatccacttccacacggaggcttcggaccatgcgggctgtgtcagcaagtgaggacagagcacggccatcccggagaacgcagaacccaactgtgcgcagatagacagatgaagaacacgggagagcagagagacgcaaatgaaccgggccagccctgtgacttaatccagcctgacatggtttggcaaaagccactcatggtcgtctctgaggctccagccaggccagcagcttgcgccttcccccattcttggctcatggtgatgtggagaagtagaagccacccacaggcaccaatttgtgagaaagacgcagcctgggcctctaggcaggagttagaggaagaccgtggggtgcggggaacgatggctgagctcggttgcggctgacacagggctggagactaatgcatcccaagcctgtctgccctctggtctgctctcctgtacactccctgccccagctctgcttagatttttagtaaagtcccttcttcatttcccctgaactgcaacctccttgagaacgaggggctggttcttattcattaattctccctccccagtgccatgcccaatggacagttgctagtacaatcaccccactgtacagataaggaaatcgaggctcagagaggcatagtgactctcccaaggtcacaccatgaatgcacagcagagacagagacccatctgagacctggacttttctcacaactcccacaggaaaggtttcacaagcaagatatcctctgcaaactcccaaacctcggctgtttgtggaggaattgggagcagaaagcaagctttttccttcccaccgtggaccccccaggctcccaaagtgacctccttagcttagaaggccctgagcaaggccattcagctactgaccaggcagttttactgcaaacccctgcctctcccacctttcttttgctgccctggtcctacagagggggaagcgaggccctggaggtgtagtgagtcagccagcgatgccgccctgaaggcagctcagggctctggctccaggttccagtctgccctgcgctctgagccatctttgtaaaaaataacaaagcttggccgggcacagtggctcacgcctgtaatcccagcactttgggaggccaaggtgggtgggtcacctgaggtcaggagttcgagaccagcctgaccaagatggtgaaaccccatctctactaaaaatacaaaattagccaggcgtggtggcgcataatcccggctacttgggaggctgagacaggagaataacccgggaggcagaggttgcagtgagctgagatcacgccattatactccagcctgggcaacaagagtgaaactctgtctgaaaaataaataaataaataacaaagctctaccctctcccttcctcctgccttaggcttaacctcagtgccttctgctatttacagcaaataagagttgcttggtgcaacctttaagaagcctcccagactgatgggaaagatgtgtttttggtctttggccacttcctagtctgatggtagaaacaggtcacacatggagaactggagagagacaaagagcagtgggcactggtgcaggcagggggctgggggcagaggagaggtgacatgaatgggcagggtggatgggggaagagtttttggcccagtgagaggccagggggagaagaggaggcttgtgtgggtgagggatggaggttgcctgccaggactagcccagggagcccaaggggcttgaaggggggcgtgggttggggcaagaccctggtgctagaggccccagatcctggacccagctccagtggagaaactttagcctgtgggtcctccccgttctcaatcccccggtgctaaaaagcccacgacatttacgacttcaggagggtaaagagcctgagaaaagaattgcagaccatatggatttgtttcctgggtttagaaaaaaatccctctaattaggccgggaaaagccattggcctctgcctgtcttgaggtccctggattcaattactgcccagcctccccacttgcggtctggtcctcccagccccctccacgcacagggggtcaggggtgggtccctgataaggggtggcctgagggaagaggggaggggggaccaggaggtgggaaggacctggggagataatctttttatttatttctgacagattccttatgagatccccttgtggctgagtcctcagcgcccagccccacagcccacccgccccgtctactcttcccagggcagaccaaggtcttgggatggcactgccttggattcccttcctctccctgccaggaaaagtttttgacatcagaagaaaacggaacccttaagcagattgagagatgaaattataggtgttttccatttctttctttctttgttaggagttaatgtcatacttttcctataataaatcgaagcaacccatgaaaaagtctctcattccttccacttgtgctcattgctctgggctctctctgaagactctgtcccctcggtctataaacactctcccaccttcttcatcctataaacaccttccctgagccctgccaccctctcacacttctcctcctgccttccctgcagaactccagattgtggggaaaaagattcacccctcatccctcccactggcaaccaacagtgtcgcactcccctctgattccttaccctcctcccactgcaagctggcctccctccttgtgggacctaagcctcaccttcccagcctccctgcagcctgggccctggggccgcaccttccttgagccactggacacagaattacctctccatccaatcctctgcccactgcctgaaggccagagcttctgggtccccttcttggccttttagtctcctttttctctttttctttttttttttttttttttgttgagatagagtctcgctgtgtcactcaggctagagttcagtggtgccatcttggctcactgcaacctccaactcccaggttcaagcaattctcctgccttcacctcccaagtagctgggattacaggcttgtgccaccatgcccagctaatttttatatttttagtagagacaaggttttgccatgttggccaggctggtcttgaactcctgacctcaggtaatccatccacctcagcctcccaaagtgctgggattacaagcgtgagccaccgcgcctggccaaccttttactctctctaggctgtatcgccttcctgcgtaagatagctcactgccgtggtggctgccaccccactctaaatgcctcccaaatctgttacctgggtaccgcctctctcctagacccggttttctggttgcctgttagttactgccttttgtatgttctaccaataccccaaacccaacatgctcaaaatgcaatgagaattcattctctatctgcatcactcctccaaaaacaaagcaataaccaacattccttcctccgtgctctgctgttgctgttgttttttaataaactttaattttttttttttagagacagggtctttttctgtcacccaggctggagtgcagtagcacaatcatagctcattgcaaccttgaactcctgggctcaagcagtcctcctgcctcagcctcccaggtagttgggaggcctggctatttttttttttttttttttttttagcagagatgaggtctcatctgttgcccagactgatctcaaactcctggccttaagcaatcctcctgcctctatgtctcagagtgttgggattacaggtatgacccactgagctcagccctaaactataattttttagagcagttttaggttaacagtaaaattgagcagaaagtacagagttcccatacactgcctctgtgcacccctccatgcacacacacagccttccccactgttgacatttgttgcaatcaatgaacctccattgacacatcattatcctctaaagtgcagagtttacattagggttcactctaagtattgtacattctatggattttgacaaatgtataatgagttgtatatcccattgcagtatcatacagaacaatttcactgccctaaaaatcctctatgttctacctcttcatcctcccctccgccaaccccctggcgatcactgatccttttattgtctccacagtttgccttttctacagtgtcatatagttgcaatatatagtatgtagcttcttcagattggcttttttcactttagtaatatacatttaggtttcctccatgttttttcatggcttgatagttaatttcattttagcaatgaataatgctccattgtctggatgtaccatagtttatttattatctgttcacctcctgaaaatatcttggttacttccacattttggcaattaagaaaaaaaaaaaaaggctgctctaaatatccaatatctatgtgcaggtttgtggacatgacttttccattcatttggaaaacgaagtagtacaactgctggatagtacggtaagagtgtgtttagttttgtaagaaactgccaaactgtcttccaaggtggctgtatcattttgcattcccaccagcagtgaatgagagttcctgctgttccacatcctcatcagtgtttggcattgtcagtgttttggattttggccattctaataggtatgtagtggcatgtcattgtcatattaatttgcaattccctaatgacatacgatgttaaatatcttttcatatgcttacttgccatttgtataccttctttggtgaggtgtctattcaggtctttcttttttctttttttatttgagatggagtctcactctgtcacccaggctggagtgcaatggcgtggtcttggctcactgcaagctcggcctcccaggttcaagcaattctcccgcctcagcctcccaagtagctgggattacaggcacgtgccaccacacctggctaattttcttttgtatttttagtaaagacggggtttcactatgttggacaggctggtctcgaactcctgacctcatgatccacctgcgtcagcctcccaaagtgctgggattacaagcgtgagacactgcgcccagcctcatttatttttaattgggttgttcattttcttgttgcgttgtaagagttcttcagatattttggataacagtcctttatcaggtgtgtcttttgcaaatattttctcccagtttgtggcttgtgttctcattctcttgacattgtcttttgcagagcagaagtttttcattttaatgaagtccagcttatcaattatttctttcattgatcatggcttctgtgttatatctaaaaagtcattgccatatctaagtgccatatccaaggtcaatttggttttctcctatattatcatctaaaagttttataattttgtgttttacatttaagtttatggtttttgttttgtttcattttgttttgtttttgacagagtctcactctgtcgcccaggctggagtgcagtagtgtgatcttggcttactgaaacctccacctcccggattcaagcaattctcctgcctgagcctctcaagtagctgggattacaggcaggcaccaccacgcccagctaattgtttttgtatttttagtagagacagggtttcaccatgttggccaggctggtctcaaacccctaacctcaagtaatccacttgccttggcctcccaaagtgctgggattacaggcgcaagcctaagtttatggtctattttgagttaattttgtgaaggatgtatggtctgtgtctggattcatttttcacatgtggatgtccagttgctctagcactagttgttgaaaagactaatttgctgtactgtattcccttgttcctttgttgaagtgtttatgtgggtctttttctaggctctgtattctgttccattgatctatttgtccactcttttgccactaccatactgtcttgattactgtagcttttttttgttttgttttcaggatggaatctcattctctcgcccaggctggagtgcagtggtgtgatctcagctcactgcaacctctgcctgcctggttcaaacgattcccctgcctcagcctcccgagtagctgggactacaggtgcgtgccaccacgcctggctaatttctgtatttttagtagagacggggtttcaccatgttggccaggctgttcttgaactcctgaccttgtgatccacccacctcagcctcccaaagtgctgggattacaggcgtgaacgactgcacctggctgagactttttatcattatcatgaacaggtgttggattttgtcaaatgatttcttggcatttatttatagaatcttgtgtgtttttttcttagcctgctaatgtgatggattacattaactgattttcaaatgttgaaccaggcttgcatctctgggataaatcccacttggttgtagtgtataattactttcatgcattgttggcttcgatttgctagtatattgctgaggacttttgcatttatgttcatgagagatatcggtctgtagttttattttcttgtaatgtgtttgtccggttttggcattagggtaatgctggcctcatagaatgagtgggaaatcattccctctgcttttaacttctgaaagacactgtagataactggcataatttcttccttgaatgtttggtaaaattcaccagtgaacccatctggggctggtgccttctgttcgggaagatattggttattgattcaatttctttaatagatacaggtctatttagattgcctattagtgttctggtttttttgttttgtttttcgttttgttttgtttttttgctttttgtcttggttttggggggtttttttgagacagagttttgctctgtcacccaggctggagtgcactggcgcaatctcggctcactgcaacctctgcctcccgggttcaagcaattatcatacctcagcctcgcaagtagctgggactacaggcgtgtgccaccaagccgagctaatgtttgcattttttattagtagaggcagggtttcaccaggctgactaggctggtcttgaactcctgacctctagtgatctgcccgcctcggcctcccaaagtgctgggattataggcgtgagccatcgtgcctagcctgtttcgttttttgatacaaggtccccttctatcacccaggctggagtgcagtggcacagtctcagctcactgcaacctctgtctcctgggcttaagttgtcctcccacctcagcctcctgagtagctggcattacaggtgtgcaccacagtgcccagctgatttttgtattctttgtggagacagagtttttccacattgcccaggctggtcaggttctctgttcttaattgctgacacttgtacccacacaggcttaaaatcttggttaccagtgactccacttctcccctacccataattgcaaaccaaatggcaactgccttggttcaggtcttccccccgacagggtaactaagaatctggaagcttggttctaggagagtggaagcttgttgcatccctaccactcaccatctatgtgacctttaccaagacactgaacctctgatctcagtttccgcatctgtaaaatggtgacgattggttgcgacagccatgttgtacaccacttggcttcacagtgaacaatatttacatggtcaaatgctgttatgttttattttaacaaggatcaacttttaggcaaatcatagaagacttgtctatggttacatcctagaagaaaggggatggggaccaatgtcttcacctccaaagtggagaatcagagctcatctatggtgggctgaacaagaaatagaagttctggccagccgcggtggctcacaactgtaatcctagcactttgggaggccgagaaatgtggatcacctgaggtcaggagttcaagaccagcctgcccaacgtggcgaaaccccgtctctactaaaaatacaaaaattagctgggcatggtggtgggcacctacaatcccagctactcgggaggctgaggcaggggaattgcttgaacttgggggtcgggggttgcagtgagccaagatcgcaccacttcacttcagcctgggtgaaagagtgaaagtttgtctcaaaaaaaaaaaaaaaaaaaagaaagaaagaaaggaaaggaaataaaagttttaaaaagtgatgcttgatgctgcaggggtgaagaggagcagaaggtctgagaacagtggagtgtaaccatatttggaaggagatgagaaattgggaggttgaaagctaaatcctcatcagtcctaaaaggcaatcaatcaatgatgtctaaaggtgataagacaaggaagagaagtaaataataaataaggtatagaaattagaggtaagaaggcaataaccagaatagaaataaaaatggttaaaagggttccctggggagcaggaccctagatgggacagggagaagttgtttttcactctcctcccttcggggctatttaattttctagtcatatgcacttattacttagttaaaacaaaactgtttaaataaattgttttaattaaaagtttcagctgggtgcgatggctcacacctgtaatcccaacactttaggaggctgaggttgggggatcacttgagctcgggagttcaagaccagcttgggcaacatagtgaaaccctgtctttacaaatacaaaaattagccaggcatggtcgcttgtgcctgtagttccagctacttgggaggctaaggtgggaggatggcatgagccctgagcccaggaggcagagattgcagtgagccgaaatcactcccctgcactccagcctgggcgacagagtaagaccctggttttttttttttttttttttttttaagtcaactaaaggattttttgagttttctttccagatatattttctttattgagatacaaataacatataataaactgcactttttttgggggggggggcgggggacggagcctcgctctgtcgcccaggctggagtgctgtggcgcgatctcagctcactgcaaactccgcctcccgggttcacgtcattctcctgcctcagcctcccgagtagctgggactacaggcgcctgccaccacacccggctatttttttgtatttttagtagagacggggtttcaccgtgttatccaggatggtctcgatctcatgacctcgtgatctgcctgcctcggcctcccaaagtgctgggattacaggcatgagccaccgcgcccggcaactgcacatattttaagtgtgcaacttgatcgttttgacatgagtatacacttaatgaaactcaccataatcaggatagtgaacatatccattatccccaaaaggttcctcacgtgctttgtaatctgttctctccccctacaactctgatctgctttctgttactacaggttaatttctattttcttttttttgagatagagtctcgctctgtcgcccaggctggagtgcagtggcacacctccgctcactgcaagctccgcctcccgggtttatgccattctgctgcctcagcctcccgagtagctggggctacaggtgcccgtcaccatgcccggctaattttttttgtattttcagtaaagacaggttttcaccatgttagccaggatggcctcgatctcctgacctcgtgatccgcccgccttagcctcccaaagtgctgggattacaggcgtgagccaccgcacccggccaggttaatttctattttctaaagttttatatgaatggggccaggcacagtggctcacacgtattaccagcactttgggagtctgaggtgggcgaatcacttgaggccaggagtctgataccagcctagtaaacgtggtgaaaccctgtctccaccaaaaaaatacaaaaattagctgggtgtggtggcaggcgcctgtaatcccagctactgggaaggctgaggcacaagaatcgcttgaacctgggaggcagaggttgcagtgagccaagatcacaacattgccctccagcctgagcctgggcgacagagtgagacactgtcagaaaaagaaagaaagaaagagagagacagagaaagaaaacaatgtacataacaatttaaatatacttcattgctaaaaatgctaatgatatctgagccttctgagagctgtaatctttctgctggtggagggtcttgtctctatgttgatgactgctgactagtcaggatggtggttgctgaaggttgcagtggccatggcaatttattaacataagacaattaagtttgccgcattgattgactcttgatgtttctgtagtacgtgacgctgtttaacagcattttacctatagtaaaacttctctctgccgcataggctctttttaaaggtgctttcccatagcacagacattaccagtagtcgtgtcaaatagcagttggtgtcttcattttatgtatatttatcatataagtctgattttttttttaagcgtcttgaatggttttctggagagacagcactggtaagtggcacatgacggtatcccagtcataagagggttgcatgattcctttgagtgtttgatttgaaaagcctagtcttgtctctcaagagcatctcggacccagaacattctccagtagtgcattcagttcaacacagcaagtgcttcactgcatggaaaacactttgaagacaaaaaagaaatcttatttctttttttgtagccttcctgatatttacagtaataccattaactgttttatcgatagcaaaaaaaggatactttttgcaatgtaattagatgttctatagtgctacaaggaattgccttccgaatggaggttcatgtataatactcatttacaattcaatatataattacacaaataatttttaaatataatcaatagtgaagactgttctgtggatggtagtgtttaatacattttctattttgtatagtgatttcaggccttttgttttcttaaaatcagcagctatttggcctaattcttagcattattttgtcctttgcgtcagtacttttttgtgcacgctttttgtgatctgtgttaaaaacctgcattgccagcattgcagcttgaacttaaacttgttattcaaataaatatttaattttttaaattgctcttgtataatcagatgccccttttagtattattttagaagcgttgggagggttttgtctaaagtacaatttatcgggaaaaactagattttagctttataaaacttttaagtctttcatgggacctatattttcttgaattaaattttgtagttctagaattaaaaaaaaaaaaaacttctctcaaaattggagtcggtcctctcaaaccctaccactcctttatcaactaagtttatggaatattctaaatattttgttgtcatttcaaaaatgttcattgcatcttcactggtaataggttccatctcaagaaaccattttctttgctcatccagaagaagcattcaagttttattataacatgtagcatttcagtaatatcttcagctctacttcaattctagttcttttgctatttccaccacatctgcagtgacttcctccactgaagtgttaaacccctcaaagtcatctgtgaggcttggaatcaacttcttccaaactcctgttaatgttgatattttcacctcctcccatgaatcatgaatgttcttaatggcatctagagtggcaaatcctttccagaagactttcaatttactttgcccatctccattagagaaatcaccatctctggcagccatagcattatgaaatgcccttcctcaataataagacttgaaagtcaaaattactccttgatctatggggctacagaatggttgttgttgtgttagcaggcataaaaacaacagttttatgagcagtagacctcaacgatggacttaaaatattcagtaaaccatgctgaaaacagatgagatgccatccaggctctattgttccatttatagagcacaggcagagcagatttagcatcattcttgaggggcctacgattttcagaatgataaatgaacattggtctcaacttcaagtcaccagctgcacagttcctatccagagagtcagcctttcctttgaagctttgaacctagacattgacttctcatctacaactatggaagtcctggatggcatcttcttccgaaagaaggctgtttcatctacactggaaatctgttgttgagtgtagccaccttcactgatgaccttagctagatcttctggataacttgctgcaacttccgcatcagcacttcctgcttcaccttacaattttatgtgatggagatggcttctttccttacacctcttaaaccaaactctgctggcttccaacttttcttcagcagcttcctcacctttctcagcattcacaggattgaacagatttggggcctgttttgccttcatgtgttcactggagtagcacttttaatttccttcaagaacttttcctttacacttacaacttggctgtttggcacaagaggcccagcttttggcctggcttggctttgacatgctgtcctcgctacactccattatttctagcttttgatttatagtgagaaatgagagactctttcacttgaacacttcaggtccattgtagggttattaactggctcaatttcaatattgtcctgtcttggggaatagagaggtccaagaagaggggaagagttgggggtaagaccagttggtgcagctgtcagaacacgtgcaacatttgttgattaagttcatcatcttatataggtgagactcatggctccccaaaacaatagtggcatcaaaaatcactaggcatagagcactataacagatacgatagtaatgaaaaagtttgaaatactgtaagaattaccaaaatatgacatagagacatactttcatactttgtattataatccaatatcacttaatttattttgttgctcagattattccctaaagtaagcacattctgttagaaaaatggtaccaatagacttggtctatacagggttgccacaaaccttcaatttgttttaaaaaaatatatctgggaagtgcaataaagtgaagcataatttagcgaggtatgtctgtatataatgtattttttctttcttttctttctttttttttttttttttttttgaggcagagtgtctctctgtcgccaggctgaatgaagtgcagtggtgcgatctcggctcactgcaacctccgcctacttggttcaagcaattctcctgcctcagcctcgtgagtagctgggattacaggcatgcaccaccacgcccggctaattttgtatttttagtagagttggggtttcaccatgttggccaggctggtctcgaactcctaacctcatgatccacccacctcgggctcccaaaatgctgggattacaagcgtgagcaacctcacctggccagattcctggtttcttttgttggaattattattagatcccaagagctgggcatgagatgtgatcatttttaataggatgtggttgctttaggccttctcatctgacagagcaaggaaatatatatatatatatacacacacacacacacacacacacacacacacacacacacatatacatatatacgtatacatatatatgtgtgctaacccatgtatagatgaatctataaatatttctatatgtaaccatctttatctgtattaagctaaacatggggccaggcatggtggctcacacctacaatcccagcactttgagaggccaaggcaggagaatcgcttgagcccaggagtttgagaccagcctgcacaacagggtgaaaccccatctctactaaaaatacaaaaaaattagctgggtgtggtggcgtgtgcctatagttccagctacctcggaagctaaagtgggaggaccacctgattccaggaagtcaaggctgtagtgagctgagatcacaccactgtactccagcttgggtgatggagtgaggtcttgtcttgaaaaaaataaataaataagccaactaaacatgagtttgtactgatgtctccaattctgatccatagatcattctatcattcttgccttctctccttgctttcctgtgacctcccctgctttcttgtaacctcctgtaacctcctacatagagagaaatctggctcctcccatcaaccatccatttactgaattgttttggggtttttttgttgttgtttgtttgtttgtttgtttgtttgtttttgagacagagtctcgctctgtcacccaggctggagtgtagtggcgtgatctcagtgtactgcaacctctgcctcccaagttcaagtgatcctcctgcctcagcctcctgaatagctgagactacagatgcccgccaccacacctggctaatttttgtatttttagtaaagatgggtttctccatgttggccaggctggtcacaagtgactcttggcctcaagtgatctacctgcctcagcctcccaaagtgctggagttacaggagtgaccaccatccccagccttcttaattgtttaatttcagtacacacatatagcagtaacagaattgttaacctttacctctgtgggaaataactttatcaactagagtacagtgcttatgtaaaatttcttttgactttagtcttacagactctacatatttccaaagtgacttgggtcagcacctttacccccacctcctttagtgaggttgttttatacatttgtgatagattgtattgacacattctgcattctcttctgagatcccccaaccttctaaatgatttttaaaatttgcatacattatgatttgctctttgtgctgtaaagttctagggtttttgacaaatgtataacatcatatttacatcattacagtatcatatagaatagttttcaccatcctaaaaaaaaaatccatgtgcttcatctgcttcatctattcaatccttcctccctaccccacaaactccttttaaccactcatctttttaccatcactatagttttgcctttatagaaacatgtaattggacttatacaataggtagcctttttaggctggcttatttcacttagaaatatgcatctaagattcatccatatctttttttcttttttttttttgagatggagtcttgctgtgtcccccaggctggagtgcagtagcacaatctcagctcactgcaacctccacttccctggattcaagcaagtcttctccctcagcctcccgagtagctaggattataggcgcctgccactacacccagctaatttttgtatttttagtagagatggggtttcaccatgttggccaggctggtctcgagctcctgacctcgtgatcagcccgcctcagcctcccaaagtgctgggattacaggtgtgagccacggcccccggccatccatatcttttcttttatcactgaataatattctctgaatggatgttcacagtttgtttatccatttacctgttgaccatcttggttgcttccagttttgggcaattataaatcaagctgctgaaaacacttgcatgcatgtgtttgtgtagacatagttttcaaatcagttgggtaaatactcaggagtgggatggttggatcgtatatttagccttatgtgaaacttccaaactgccttccagtgttctgtaccattttgcattcccactaacaatgaatgacagtccctattgcctcatatctttgtcaaccaattgatattgttagtattttaaattgtagccattttgataggtgtgtagtgatatcacattttttgttttggcttttgttttaattttcaattccctgatgaaatatgacatggaacatcaaatgttaatttgccatctgtgtatcttctttggggagatgtctgttcagattttttgctgattttttaagtgggttggtatgtttttatattgttgagttttaagagttatttgtatattttggatacaagtcctttttcagaaatgtgttttgcaaattttttttgcaatctgtggcttctcttcattttcttaacagtgtcttttgaaaagatttttattttgatgaagtccaatttatcaacttgttcttttatgaattcctggttttgttgtcatatttaagaaacctttgcctagcccaaggccaaatatatttcctcttaggttttcttctggaagttttataattttaaattttacatttggcctatgacaaattttgagttaattttcatatatggtgagatacacagttcaggttttgttttgttttgttttgttttgttttgttttgttttgtttgagatagagtctcgctcttgtcacccaggctggagtgcagtggcatgatctcggctcactgcaacctccgcctcctgagttcgagcaattttcctgcctcagccttccaaggagcttggagtacaggcatgtgctaccacgcccagctaattttttttttttttttaagacagagtttcacttttgttgcccaggctggagtgcaatggcacgacctcagctcactgcaacctccgcctcctgggttcaagcgattttcctgcctcagcctcctgagtagctgggattacaggacatgccaccacgcctggctaatttttatatttttagtagagacggggtttcaccatgttgcccaggctggtctcaaattcctgactttaggtgatctgcctacctcggcctcccaaagtgctgggattacaggcgtgagtcaccgcgccctacgggatcaggttttttacatgtgaatatccaattgttccagcaccatttgttgaaaagactatcctttctccactgaattccctttgcacctttgtcaaaaattagttgcccatgtacatgtgggtctatttctggattctctactttgttacattgatctgtttatctatctttacctcacacacatgcactgattagtactctgcctgatactcaaggcagccctttctgcagatctgggagttgccctctgagcagttgtctcctctccagcactctgtcttgctgactctagtccccttggtctctccttggactctcacctccatctcttccttccagaaagtcccccaggctctgcccagttctttctccctgtgccacagcctgataactctctaggcaggaagctggagaaatcttagggctcagctcacttgttttctgtctctcaagaatttctttccttcattgcctgatgtccagtaccttgaaactgatgttccatatatcctctccagctgtctgaaagttttgaaggggaaggaaatacagtccctgctactccatcctgggcaaaggcctacaactaaagaatttaaaactctctgtgttagtctgttctcacactaccataaagaactacctgaggctgggtaatttatgaagaaaacagatttaattgactcacagttccacaggctatgcaggaagcatggctgggaggcctcaggaaacataaccatggtggtaggtgaaggggaagcaaccacatcttcacatagcagcaggagagagagagcaaagggggagatgctacacacttttaagcaaacagatctcatgagaactcactcactatcacaagaacacgaagggggggaatctgcccccacgatccaatcacctcccaccaggtccctcccccaacattgggaattacaattcgacatcagatttgggtggggacacagagccaaatcatatccctctcttccagctttaaattttgaagttaattaagacttctggccagtctccctgctccatgcaggtctcacttaaagtttagactgccaggatgcaggagggcaggagcatgccaaacagagcaaagggcccgtgcagggcctggaggtggggaactgtagggcgggatgtgtttggggacatgggagtaggaaatagaaaagaagaaagtgaactcgggacagatcgtcccatagctggaggggagaagaggagatggcagaggggtgggacacagtgaggagctgagaagaggccaagggagcccaggggttcaccccagggcacgggctggtgcaggggaatgtgccaaggctgaactcggctccgcctgaccccagagctcaaactctgaaccacttacaaccctgcccattctgataacctggccagaaaggtgaagaggagttcatacgggacccagaccgagggaccctgcctgaggttcacagcccccaggaggaacagaaatggaggacaaaattgggttttcctggtcccagaagggttgctcccctccaggatgctgagcagggcccctgcaatgtgaggggcttggtctgagtgtcacaggagcccagagttcccacccggtccccacatggtcccaagggctggggtgaaggcagctcatggtggacactttactgtgcccctgaagatcctgggggtggaaagaggtggagccttacaatgtgaagctgggaacctgctggatgtgcagatgtctgggcacctcctggagattcagactcattgggtatgggttggggctgggccttggagctcccaggcgattctgttgcaacaggtgacctggggctcctccttgagaggccccgcttcatgcaatgggcatcttttcccaaagagccgctgggaaggtggagggccaatcgttcagtgctctaagaatctcccagtcagtgtcccagtgggagtccagggcctggggagagaacaacaagcaggtgggggaggggaggggcctcagcaggcaggcagaggcaagcttggtgaagggggttctgtcggcagccctttaaagtcccctgtgctctgggctccttcccatcccagatcttatctctgggtgcctgtccctggatggagcttccccagggcaccccaggaccccccagggaaggaagagggggcagatcaaagggcgggcgcccagacaagggaacctgagatgctgtctttgtctgcatcctggagaggcccgggggagacaggatggatgggagccctgggccagaggctagtggggtgggggggtcagtggagaaaccaaatcctggtgtattcactatggacaaaaggaaggggttggagagggggtcaggctcctctcaccagctgctctggctagaggcttccggcaaggtcttggtacatccgggtcaggttctcttcagggtcaggaaagagccaaaggaggtggcagtttggggacccaaatccacgcatcaagactcccttttaactgattccaaattatccacacccaggagggggcctaggagcagaaccgggggtgagggtagagtagaaaaataggccactccccagattccccattcccagacacccccacccctccgggaaagctgaacagccacttgggtgtaacaccatccccaagcttgggctccctcacatctggagccccagctgctgctgccatggaggctgtgaactcttccccgcggcctgcctggtcacaacaacaggagaagagccgagggggcggcagctgtctgctcggggctgtctggccacaggctgacgccagggctctggaagggggtggcgacagtgggaatccgtgtttcacctgcctctatggtaatttggggccttacagttggagttagggttgggcatgtgtttgggataggattagcattatcccaactttggtcagaattcaaggagaaccagagactgagacccccaaaccttgtgcccctcacaatattccaggcgagaagaggtggtgagctgggtggaggtggggctgggtaaacccgggggcaggtgggagtgcgaaggcctgaagtcaccttcctgttctccagggctctcacacaccatgacccttccctccatcacctctgaggctggttgttctaaacccacctgtacctgttgctgtctctgttaccacacattcagcagcttaaaacaacacacatttaccacctcagaggtttcgcgggccaggagcctgggtgcaggtcctctacccagggtctcacagtccaggtgtcggctgggctacctttcctcatgggcctcttccaaggtcacacggttgttggcagccttcagttcttgcggccctagggctgaggttccggttttccaaccggcagccagtggctgctctcagctccagaggccgcccacagtccctgccactggccctcacccaggccccctcagtgcagggcaggacacatcttcaaggccagcaggaggctctctctgacctcagggagggcctcagtccctcttttaagagctttcacttgattacatcaggcccacccaaggtaatctcccttttgataaatcaaaatcaaccagtttgggaccttaattacatctgcaaagccccttcacctttgccgtgttctattggctgaaagcaggttgccgatcctgcctgcgcccgggggaggggaatctgcgagagcatcactcactggggtcaccttaggttgcctctgccaccatcccaccttttctcacatcactacatctcctccttctgcagacttctgccatctcggtctccgtgagtcagcgagcctgccaatagtccagggaggggggcaggggggaccctttctttcttcaactttgacttcacagagggctgtggaaggtgcaccaggcatgctgggggtgtgcaggcctgagacccccatccttatcggggaggctaactccacataaagaagccactttagatccttagaggaaaccaggaaagtgtctaagcagaggggtactttgagccagggctggtggcagtttgcgggcagccaggatggggggtggggagaggaaaggacagctccagctaaggggcggcttaagcaaagtggatttggggaacaatgtggctgttgactgcagggctttagacagacagatcagactggcaggcagctgggggagcactgggaatgtcaggctgggggcaatggggagccacgtgtgcctgtgggtgggggacatgataacatcttgttatggacgcctcctgagaatcccgtttccttctctatattgagctcccactataagccggacactgtgtttggggctgggaatgcaatactgaatcagcagagaggggacctcagggattttagagacgaatcgggacagacaaaccaagtcatcaattacatctgcagtgtgaactaggagaggacagggtattgcaagagcaaggaaccaaggatctgacctagtctggcaagtccacagaggcccggatgggaggggatgtggtggaaggaggcagccaagccgtggtggtgacccatatatcacatcgccccacgaaccacggcagagaaaacagaaaaggacaggggagtgcctcctggccctcacacatgaaaataaggtctggaaccaacctccttgtccctaattcttatcctctttcaaaataaaggccacccacactcctgtgtgcccaagtccaacctggcaccttcctcctgatttcacccaccatgaaggaaaagccccagaatcccgaacccctgcatggactcagaggcacgcggccagccagaggggcattgccgtgtgtctgcaggctgtgggtgctccccggggtgggtcacccctctgtgcccaactcagcaggcccaggggcccccgccccactgcctcactgttctgcacacccacccagatgttctcacgccccatcgccccagacacagccccagacagctgcacagctggcctcctggccggtgggacagtaggcctgccaatagcccggggaaggagggcacacaggggacacctcagacaaacagatctgctgccctgagccaaagcatacaacgggcaggggcctgagcaagcaggctggccagggggtgggcttaaccctttctcttccagcatggccccaaggagtcccctgtgaactcatcgctgccattcccctgcctccagcctcatgctcccccttccttgcttcctgaagaacaggttcattcattctctcatttttacagacatgggtaagacaggtttgcccccaaggtgccagggtctagaagttcttcctgttgtctgaccctcctactctgtgttggtcactgctgtcctctgctatggcagctgctgactgcccccttctggccagtggctcctgcccttggatctccagttcccctcagcctccaggtgggccaacaggaggtctaggaatagtaggagcaggagacatggccatcgcagggtctggagggagctcaaggcacctccatgtcccaagggtgttgcctctgctctggaggcagcacagagccatgggtgcagcctggtcacaggtccccacccactaaccaagcctggacaagtctctgagtccctgcttccccatctgcaggatgacagtgagcataggagccccatgcgggctactcagaggacgagaggaggccatgcctgccacacagggtgactgctcggcggctgcctctggctatctttatgacaatagcaggtactgagcacactctggggacaacaacatctgagccatcttgaattcacactcttgtgcgcgaggcagacattgaacccataggcaaatcagcaaaacgtggtaatcctagatgtgacaagtgacaggaaggaaatcaaaatgggggtgagcaggggcctgggggggaggaggagggggcagccacagtcagggctggggtttagagatggggtttgcccatctctcagggcctgggtcctggtatgtgttgggagacagattcaaaggtgaatgggtgccaggccctgccccaagacctcctagccctgacaaatgctgagacatgcagggttgcaggcgcacacagaaggggcccttcgtcgccagggcaggcagagggagaaaggggctctgggctattggaagagaaagtgaggctgggtgtggtagggcggccctgtgaggccggaggtgacaggctctgaatgccaggcaaagagttggggcgttctcctggggcactagggaaccatggaaggtttgaggccaggaagtgatgtctcagatgtgggtttctggagagccactctggctactgtgagaagtaggggttggcaaggccggccctagggaatggtgcgggcctgaagcctggtggcccagaagcccaggtagaaggggccaagtttgtgttgaggaggaaaatgggtagttcctggcgactgactgcagctgcagaagggaaagaactggagtctccccaggagcgtgactgtgacccgctcctctcaattcaatgcttgggtgagcatctgtgacaggccaggcttgtcccatgtgcaagggacagccatgaacgggccagatgaggaatctcacagagctcccagcctgtgagggacaagcgggtgttaaacacatcgcaaagagagtgatgacttacgaattcttaaaggaaggggccaggctgtgtgctgtgcacctcgagctccctgagggcaggggctgtgtctcccccttcactctggagtccctgaggttggagcagtgtgctctctgcaggctggaggctccctcagagagggtctgtctcctgccagggctgtggctgtgcaccggctgtcaggccctgcctgctccctacaccacctgaggcgccagaacagaggggaacaggccgtgtcatcctgaaacactcaccagccacccgctgaactgagctgagcccacaactccagggcagccaggccgcccactttctctcagaagcacctctcagggatgtggccagaggagatctccccacataaggtcccccctggggctccgcccttgctgccacagctgcccagtctccccacagccctgggccctccgctgtggaagccaggggtggctgctgagtggggctggggactctgggcagaggctgatattcgctctcactttcagagggcccgagggcaggaacaggagggctggctgcggaaagtgtccttagcctccgtcctcagtcctgtgggcctttgttctattggcctcagtttgcccctgaggtgatggatctgcggtggtcatggcagtcccttctggccctcacagttgttggggttttgttttgttttgtttttgagatggagtctcgctctgtcacccaggctggagtgcagtggtgcaatctcggctcactgtaacctccgcctcccaggttcaagcgattctcttgcctcaacctcccaagaagctggaattacaggcatgcaccaccatgcctgggccaatttttgcatttttttttttttttttttgagatggagtttcgttcttgttgtccagactggagtgcagttgtgggatctcggctcaatgcaacctccaccccctgggttcaagcgattttcctgcctcagcctcctgagtagctggattacaggcatgcgccaccacgcccagctaattttgtacgtttagcagagatgggtttctccatgttggtcaggctgatctcgaactcccaacttcaggtgatccacccacctcggtctcccaaagtactgggattacaggcgtgagccactgtgccaggccaatttttgcatttttagtagagatgaggtttctccatgttggccagaatggtctcaaactcctgacctcaagtgatctgctcacctcggcctcccaaaatgccgggattacaggtgtgagccaatgagcccagcctatctgttgttttttaatttcaatagggacaatacatcttgggaagttgaaaggtaaggaattatgccatgtgagagacccacgaggcaaaggaggggaaatgccacagcatgagagatttgaggctgacacccagaaggactttcgagaaggagggtgtgagccgctggatgggccccgtgtggtttctttacagggctccatctggctggccaggaggggtctggggccaaggcagtctaggagtacacatttgccctttgtagctgggccacagagttttgtcctgggctgctctgggctgggttcccttcctggcatgcatggagtttgacctttggcctttggttaggcctagggcaaggctgtttgtctgtccactcaccccagatcattaggactgtgtagaacccagggctgggctctgagaggagctggcagtctgtctggaggtcagaggcagacacgcccctgccttcaggacagtagggacagtcgccactgtcagggagctcaaatcctatgggggatacctggctcctgccatcaggggccccacccagtcaaaggaaggagtcccaggctctgcctcagggaagagacctgtcacatgaagaaagacccaggagtcaggcaaacacgaagccccagctctggaggcagctggacccccaaccacgtgtgactatgaaactgatcagaagctacagggagcagagatggccgcccaccgaggagaaagtgtattatgttggaggagcaggcatcgccccctacccacagcctgtctggacacctgcataggggaagacgggtgggtgggagaaagtcctgctcggggctgtgagcacatccatgggcaggtgttctgtgctcggcctggaggttgggcgtgcctgtgtgcttggtcctcaatgccagtaaacgtgctccgtgtagacactctgcggagggcctaagagggtgtgaggtgtaggcgtgtgcactgcccgtgcagcacgcgtgcatgagtcaggatgtgtactcccgggcagagggacaagcactcgcctgaggtggggagcctgggcacggtcttggcccgatgacatcgtgctgagtgatctcgggtgccctgtgcgcagggagggagtcagaaggctgtgtgagcctctccagcaacatgggtctgtgttctgagccccaaggaaagccccaggcgccctgcatgcccactgcaggcctctgtctacccttgatccctcaccctggcgccccgacaactgggcctgaccagtgaatgctggctgagccagctgtcactgtgacatccattctccgcggtggggcctgggagccctcacccagctcccccagctcttcccccctcctctcctacgcctgcccccacagctgggaactaggcccagtggcagctggaagcctcccgtggggtctcacggaatacgtagggtcttatggagttttcagccttaacccatgagctagaggggaccaaggcaacaaggagctctgctcccagcactgctagagcccctctttccacggcccctgtccccagaactccaggaagacttctggggtgacagcccaggcaaaggccaggaaggagaagactgcttatttgcatatcactcccatctgatttgcatgtgcagtgaggctggccatttctaagttatgctggaatcttgatttcaggatgctgagcctttcctcacatctattcttggggcttgcctctctccatcccgccttgacccagacacctcctaaaggacagccacacacacacacacacacacacacacacacacacacacacacacacttcagtccctgcatatacctgcatttacagacctgtatttgcatacatacacctatagccccctccatgagagtcctgggtgcctggccctgtgcatgctccatggggatatacactgttacacacatgtacacacttgcacaggcagttgcacagacacccatggttatgtgttttcacacccacacacaattcacccacatttctctacactcctatacaccctcccagagcctccagtgcattctgcaccctccattgatgaatgagcacacacacctcggcctcacacaggggcccagagcctgcacacgctccacacactgggcctggctgccagtgaggtgctctaagcagcagacccctcccagaccccaacctgggcaggactggcagcagctgtcctgtgtgactgtttcagtggctttaccaccaaggggtctctggaattcccaagttagggggcagtcctttagtgagagctttgtctccactgaaatatggctcctacctgcattttctgtcttatctccatcatccctcccaccccctcaagtcccctgccttcattaatcaccaaacacagcttccttgggtggccctgccttctacctttgttcaccctgttccccaccagaacacctgcttgctttcctccaccatatacacttgtgcctctttgcccttgtccattctcttccctcctcctaggttggcttccctccctgtccctctgatgaactcctatgcatccttcaaatcccacctcaaatgtcaccttgtgggtaaactcttctccagctttaccaagcagaagtagtcattcctcactctgggcatccagaggcagaacagtgtggtggagagacaggattggcctgtctggattggggctcgtgggctgcaatcctctgtttgtaagaaggagccaggggactgttctggaaactgcaattacatggcaagcatcttggtttcaatggtattttgtgtttattgctgtggaagggcccaggcacggaagtcacacagtgctgcttcccccttctctgctttgcacctttgggcaagtgttgcaatctctcggggcccgtttccccgcctgtaccatgggctcacggtgggggattatgaggacccaattaaaatgtgaacctttgtgacctgaattctcattacaccgaacagtaaagacgaatttggctcaaaggatttttgctcacttctctatctccctgctggactggaaattccttgagggcaagggctatgtctcttttatctgaaaaatgaggataagaggccagaccttagacttatgatgaggattagagttcattcacaggatgtgcttaaaagagctccctggcactccctcagggtttgttgctataattactgttacatacactatcatttaatcctgacatcaaccttgtgttgttggagatacggttatcccacttcacaggtgaggaaagcaagttttggaatgcttagggccctcgttgctaaggtaagcaaggttcagaacccagatttgaacctggatctggcagaggcctaaccaagatgtcctcatgttgtcatcatggatcaggatatgatggttctgggcaaactgatcacatgtccagcccgggacttggtggtgtggcctgtctgtgtgtgtctatgcccccgctgtgtctccacagcatgcagcctgtgctccaggtggaccagcaactgatgacagtgtggacacctgagaaggagctgccccgtggccccatccccatggcaaacaggttcatctgtacccaggaacaggaggccacaaggggaaggggagacaggaggatctggggccaaggtctttttccacaagggcccagggtgctggtcgttcagcccctcccaacacttccactcagcatcccggcccggagcacctggctggggagacctttccactccacacgccacaggagagtgagcaccacgtgactcctgggaagcctgccctggaatgcacgtccggggagccctattccccccgaccttcccactacagacctcgggccaacagcctaatgggggccctcagtcctgtgaggacggctatggggactgcatagggcaaaagaggcaggggcacatgggtttcctgggtgacatctgggccacagccaggccagagtggttcctccaagtcacacagcaagcctgggcctgcctggccccctgagtcagtgggagcccccttgccctgaccctgctgggggcttggctatcaggtggtgggagtccctggatgttctgctgtgggcctggttccacctgtgtgcccagtctgcttcagggagggtgtctcagatggcccaaatcccagtagggacaaactaggcgtctgagaggtggtagagcttcctctgttcttgggaccaagcacactcccgggagcctgccagcctgggacggcagagccaatggggcatgaaacaggaaaggaggggctttcttggaatgaagcaagacacgggcgtgagaggcctgcagcttggggctgatgctgcctttggatgtccccgctggggcccggccagctctgggcgtggggagaattatggggaggagcggggatgtagggattaggggtgtggggagggtgaggcctagaagagcccgtgatggaggttgccgtgcacaggaaagggctgtccagggatattctagccttggggtcccctgccctgggcatgcaccaggaagccagccaccctctcagcccccttcccactgccaggtttcttggggagaatctggtagaagcctcccaattcagcttctcccacctgcccgctgagacccagggctcccatcccagctattctccactcccaagaagagagggaggagggctgtgctggggttagaggacggcgggatttactgggatttattggtttgggcagggaaccactaagacgcctgggaaagtggctaacacccctctcctggcttcttcaacaccagctccccctcagctctggaagcagccatgtcgcttttagctacagtgagagagattcgagctggacaccaagacctgacaccaggggtaacgactgcgtggcgcaaggagagctctctctcctgcccagagacacaccaggctgtgaaatttgcccggaggcaggggcatggaaggaatgacctcctgggcaggtccagatccagcatgacctcaccggccggggccctgagaaccggacactcgagtcctgtggacactctggagtgaatagggctgcgcggagaaggacacgtggacgaggaggtaccggatgcctggggcccacccagggcctgggctacagggacccgctctgccatgcgccgagcctgctcgggtgcggcggtgccacagcgccctctgttggccagaggcggaggccgcctgttcagggcctctgatggaaacggggactggagctgcctacaagacaggcaggtgctccagcgttctgcccggagtcagcggccacggaggtggccatcccagctgggagaaccttggagactcctgtgccaagccctgttcttttgctgggaaacttgaagccaagagaggagagaggcccggtgcatccgggtgctgggcccgggactggactgtgggggctgtccaggttccagtggtggaagcatgggatgccccaggactccctagtcacccccacgagtcacctcaaacccccatccagccgactgcaaaagcacagcttctagacagctcccacccctgcccccaccttccacccagactgcaggcccctcaatccgtaacaattctagagcctccccatctccccagcaccctctgctcccacacaccctccagccccctttgccccactccatccgcagcctcaggagactctctgtgctcacctatacaccaaccatttcccacttaaagcctctgctgctttcttcttttgtccccaggaagtgaaaactttatgtcttttcctttttgattaactttcttggattttctttttaattaaaaaccatagtactacatgttctttgtaacagcttaaacaaaccagaggtatctaaagaaaaagttgataatctcctctctccctctccagtcccccttcgccggtcactaatgtggctgaaggagcgttgttctgccttgggttctctcaggaccttcgttaaacaagtaagaaggactgagacctattatgtgttgggctctgggctaagcctggctgcaagagccaacaagtcagcagccatggagcccactgccttgatggggcctcgattctagtggaggggaggagaatgtttcaaatggtgatgaattcttggggggaagggatggtgggatgataggtgatggaccggaagtcaggtggcctggagcaggagtaaaatgccactttccacctgctgcaagtgggattgccagggaagggctctctgaggagggacatttgagtggagctccaatagagggcactgtaggccaccataaggagcttgaacgttattctgagggcgtcggaaagccactgagggaagggaggggacctgatgtgatgtgcgttgcccaaggacccctcgggtgtccactgggtggagaacagattgagagtgggacagtgtagctgacaggaaacaaattagatagacagataggtagataatggatagataaatcagtagataattgatagatcaagagatatgttgatcaatagataataaataatggttgataattgattgaacaatagataatcgatagctatagataggaattgacagataaaatagacattccttctatttatttatttattttgagacagggtctgactctgacgccaggctggagtgcagtggcatgatcacagctcactgcagcctcaagctcctaggatcaagcgttcctcccatctcagcctcctaagtagctgagactgcaggcacacaccaccacacacagcaaattttttaaaaaattcatagagacaaggtttcaccatgttacccaggctggtctcaaacttctgggctcaagccatcagctttcctcagcctcccaaagtgctgggattacaggtgtgagccaccatgcctggccttctttttaagtaaaaatgggcccaatgatacagattgccctgctcctgccccttttcctctggtacttccaggtcagaacacgctcctccactccaaaggggcagcaattcatcctctgggcagccccacagctgccacagccctggctatacatcaatcttttgatttttccaatccacagggtaaaacacccccccccccccacacacacacacacacacaacaatttgagcaacaaaaatatattggataatcacttaaagtataaaataaatatcgatgagtccacactgatatgtataaatgattgaataaattagtaagtgggggccaggcatggtggctcacgcctataatctcagcactttgggaggccaaggcgggcggatcacttgaggtcaggaattcaaggccagtctggtcaacatggcaaaaccccatctctaccaaaaatacaaaaattagctgggcgtggtggcagactcctgcaatcccagctactcaggaggatgaggcaggagaatcacttgaatcgggcaggcggaggttgcggtgagccgagatcatgccactgcactctagcctgggtgacagaccgagactccatctcaaaaaaacaattaataagtgggagagaagagacaaatatctcatgcaggattccaaataaattatgtcgcgacctcaccttaaaagagggggaacattactccccactatggggtgcacatcaggacttccttctaaatagcactgtatggagattaactctgcagtggagacactgaccaagatgacaccagccaggggatcaaggtcaataccaacagttttttggctccttgatatgatgagtgaaatggcactttacttctgtggtcttcctcccaaaaacccacagccccaactatgagaaaaacatcagacaaactccagcagagcagtaccctacaatatccttgaccagtactcctcaaactgtcaaggtcatcagaaacaaagaaggtctgagaaatggccacagctgagagaagcctcagggaaaatcataactagaagtcatgaggcatttggcaatgacggatcctgcaaaagaaaaaaggacactaggcaaaaactaaggcattttaataaactatggacttgagttaataagcaaatataaacattgattcactgattgtaacatgtatcatactaaggtaagttgttgataatggggaaacagagttgggaggtaccgatgggaactctctgtaccatctgctcaacttttttccataagtataaaacaactctaaaaaattgtctattaatttttaaaaatgcacaacttgttgttttatttttatttttatttatttattttgtgtgtgtgtgtgagacagggtctcactctctcacccaggctggaatacagcagcatgatccctgttcaccacaacctccgtctcccaggctcaagggattctcctgcctcagcctcccgagtagctgagattacaggcgcctgccaccatgccgggctaatttttgtatttttagtagagaaggggtttcactgtgttaaccaggctggtctcgaactcctgacctcaggtgatccacctgcctcggcctcccaaagtgctggcattacaggcatgagctatcgcacccggcctcattgtttttttaaatggtatttccactaaacaagtaagaaggactgagaactactatgtgttgggctctgggccctgactcctactgaggctgaatctcttttcgcatagactagcacaccttgctttattacgtttcacttaattgtgcttcacaaataatgtgttttttacaaattgaaggtttgagacaaccccacgttgagcaagtctattggcaccatttttccaacagcatgtgctcactttgtgtctctgtatcacattttggtaactcttgcaatatttaaaacttttccctattattattattattttatttatttatttatgtttttaagacagagtttcactctgtcactcaggctggagtgcaatggaatgatcttggctcactgcaacctctgcttcctgggttcaagcgaatctcctgcctcagtctcccgagtagctgggattacaggtgcatgcctccacacccggctagtttttgtatttttagtagagacaggatttaatcatgttggccaggctggtctcgaactcttgacctcaagtgattcacccacctcagcctcccaaagtgctgggattacaggcatgaacaccgcacccagcctcactattattatatctgttatgatgatctgtgatcggtgacatttgatgttattgtaattgatttggggtgccacaaaccatgcccatataagacggtaaacttaaatgatcaaagttttgtgtgttctgactgctccaactggccatcctcacatctctctccctctccttgggccttcctattcctttagacacattattaagattaggccaattaataaccctctaagtattcaagtgaaagaaagacatatctctcagtttaaatcaaaagctaggaatgattaaactcagtgaggaaggcaggttgaaagccaagataggctgaaagttaggcctcctgcaccagccaagttgtgaatccagcttggagaacctcaagggaaaggtcttgaaggaaattaaaagtgctactctagtgaacccaccgatgataagaaagtgaaacagcaaatcaatgttgtatctcattgctgaggtggagaaagtttgagtggtctggatagaagatcaaatcagccacaacattcccttaagccaaagcctaatccagagccaggctctaactctttcagttctgtgaaggctgagagaggtgaagaagctgcagaagaaaagttggaagctaacagaggtgggttaataaggtttaaggaaagaagacatctccagaacaaaaaaaaagtgcaagatgaagcagcaggtgctgatgtagaagctgcagcaagttatccagatctagctaagatcactgatgaaagcagctacactcaacaacagactttcagtgtagatgaaacagctttctattggaagaagatgccatccaggattttcatagctaagaagaaaagttaacgcttggcttcaaagcttcaaaggacaggctgagtctcttgttaggggctaatgcagctgatgacatagagttgaagacagtgttcatttatcattttgaaaatcccagggcccttaagaatcctgccaaatcgactctgcctgtgctctagaaatggaacaaagcctggctaacagcacagatgtttccagcatggtttcctgaatattttaagcccactgttgagacctatcactcaaaacaaaaagattcctttcaaaatattattgctcgttgacaatgcacctgatcacccaagagctctggcagagatgtgcaaatgttgttgtcatgcctaacatagcatccattctgcagtccacggatcaaggagtaatgtcaactttcaaggcttattaaaatttccatttcaggccgggcgcggtgactcacgccagtaatcccagcactctgggaggctgaagcggaccgatcacaagaagtcgggagttcgagaccagcctgaccaacatggagaaaccctgtctctactaaaaatgcaaaattagccaggcgtggtggtgcatgcctgtagtctcagctacttgggaggctaaggcaggagaatcgcttgaacctgggaggtggaggttgcggtgagccgagatcgcaccattgcactccagcctgggcaaaaataacaaaaaaagctccgtatcaaaaaaaaaaaaaaaaaagaattccatttcataaagctgtagctaccttaggtagtaattcctctgatggatctgggcaaagtaaattgaaaaccttctgggccacgcatagtggctcatgcctataattccaacaccttaagaggctgaggcaggagacttgcttgaagtcaggagtttgagaccagtgggggcaacagagcaaaaccctgtttctaccaaaaaaaaaaaatagccaggcatgatggcttgtgcctgtagtcctggaggctgcgatgagaggatcacttgagccagaagattgaggccacagtgagctatggtcatgccactgtactccagcctcagcaacagaatgagaccttgtctcaaaaaaagaaaaaaaaaaggccaggcgcggtggctcatgcctgtagtcccagcactttgggaggccgaggcaggcggatcacctgaggtcaggagctccagaccagcctggccaacatggtgaaaccccgtctctattaaaaatacaaaaattagccgagtgtggtggcatgcgcctgtggtcccagctactcaagaggctgagggaggagaattgcctgaacctgggaggcggaggttgcagtgagctgagatagcaccattgcactccagtctgggcaacagagcaagctcgaaaggaaggaaggaaggaaggaaggaaggaaggaaggaaggaaggagggagggagggagggagggagggagggagggaaggaagaaggaaggaaggaaggaaggaaggaaggaaggaaggaaggaaggaaggaaggaaaagaaaaaacctcctggagaggattcaccattctagacgccattaagaacattcatgattcggccgggcatggtggctcgtgcctgtaatcccaccactttaggaggccaaggcaggcagatcacctgaggtcaggagttcaaggccagtctggccaacctggtgaaaccccgtctctactaaaaatacaaaaattagctgggcttggtggcaggcgcctgtaatcccagcaactcaggaggctgaggcaggggaatcgcttgaacccaggaggcagacgttgcagtgagccgagatcgtgccattgcactccagcgtgggggacaagagcgagactttgtccccccaccaaaaaaaaaaaaaattcatgattcatgggaggaggtcaaaacatcaacattaacaggagtttggaagaagttgatttcagccctgtggctgacttactttaaaggtttcaagaccagtggaggaagtaactgcagatttggtggaaatagcaatagaactagaagtggaccctgaagatgtgactgaattgctgcaatctcacaataaaactggatgagtaaggaattgcttcttatggatgagcaaaaaaagtggtttcttgagatggaatctactcctcctgaagaggctgtgaacattgttgaaatgacaacaaaggacttagaaaattccataaacttagttgataaagtagtggcagaatttgagaggactgactgcaattttgaaagaagttctactatgggtaaaatgctatgaaatgctatagagaaatagtttcgtgaatggaagagtcagtcaatgcaatccccaccccacaaaggcccccacaacttcattgttgtccggtgttaagaaattgcaaccaggcactgtggctcacgccataatcccagaattttgagaggccaaggcaggcggatcacctgaggtcaggagttcgagactagcctggccaatatggcaaaaccccgtctctactaaaaatacaaaaattagccaggcgtggtggtgcacacctgtaatcccagctactcgggaggctgaggcaggagaactgcttgaacccaagaggcagaggttacagtgagccaagatcgcaccactgcactccagcctgggtgacagagccagactccatcttaaaaaaaaaaaaagaaaaagaaaagaaaaaaaaaattgcaaccgggcacagtggctcacgcctataatcccagcactttgagaggccaaggcaaaaggatcacaacaacttaccaggagttcgagaccagtctgtacaacatggtgaaaccctgtctctacaaaaaaagatacaaaaaattccatcctggtaaaccccttctctactaaaaatacaaaaaattagctgggcttggtggcggacacctgtagtctcagcaactcgggaggctgaggcaggagaatggcgtgaacccgggaggcggagcttgcagtgagccgagattgcgccactgcactccagcctgggtgacagagcaagactccgtctcaaaaaaaaaaaaaaattacccaggtgtggtggcatgcacctatagtcccagctactagggaggctgaggagggagaatggcttgagcctgggaggttgaggttgcagtgagccatgatcatgccactgcactccagtctgggtgacaaagtgagaacctctttcaaaaaaaaaaaattgaaattgccaccatcaccccagtcttcagcaatcaacaccctgatcagtcagcagccatcgacttcgaggggagactccccaccagcaaaaagagtacaactctctgaaggctgagatgatggttagcatattttagcactatagtactctttaattaagctatgtacatttctagacatatgccattgcacacttaatagactacagtgtggtgtaaacataacttttatatgcactgggaaaccaaaatatccgtgtgactcactttattatgatattcactttattgctgtggtctggaactgaacttgcagtatctccaaggtatgcctgtatattcttctgtaactgcttgttcatacctctactttcaaatcttttctcttttaaaaatggtttatagtttttttcataggaaggatactaatcctggccaggcgcaatagctcacacctgtaatcccagcactttggtggccgaggtgggcggatcacctgaggtcaggaggtgatcctgaccagcctggcaaacatggtaaaaccccatctctactaaaaatacaaaaattagccgggtgtggtggcaggtgcctgttactcccagctactcaggaggctgaggcaggagaatcgcttgaacccaggaggtggaggttgcagtgagctgagatcccgccaccgcactccagcccaggcaacagagtgactcggtcgcaaaaaaaaaaaaaaaaaaaaaaaaaaggaaagaaaaagaaaatatattaatcctttgtctgttacacacattgcgaatattacttcggtctatttttttacctctttattttgtttacaggaccttatgtcattcagaaataattttttcataatcaaatctctctcattgactgtttctcttgttggtggcttcttagtttcctgtcttacttaaaaagaacttcctcacccacaagggaaaagaattagtcttctaaattttcttctaatatttttagttgcttctaatatatttagatttttactttaaatctttggtccatctgggatctattttgtaggtgttatcagatgggagggaggatttggctttattttctcccagatggatcactgatacggcagcatcatttattaaataaattgacttttgccctaaattggcatttccccttgaacagataataaattcccatatagatccctggattggcttccaggagaccatcttccccagctctccatgaggtcatcaacatccagctcaaaagtccacacccaccatcttcttaaaggctgctcctacctccccccatcctcccatctgaaatcaacattttccccacctgcactcccatggaattcattcactgcacacacatttattgagctccccctgggtgtcaggtgctggactagagatgactgtccctgtcttctaggagttcaagccgggggcgggagaaaggcagagaacagagtataatgatgcttgaggacaggtgactggggttacagtggtgggaggggtgtcaattccatttcagaaaagcctccaggaggaagtgatatctgagctctgttaagcctcaaatggtgagtaggtgtttgccagacagccaagaaggaaagggggggtcacgtggagggaacactgtgtacaaaggcacagaaagcctgctgcgttcggggagctgcaaatggttcagaggccacagtggagggagggcagaggaagggaaagtggaaagggactggcgggtgagcgggcctgaacgccctggcgtaggcgtgctgacgggtttggactctctcctgagaggcagtatgttgcgataaggatgccagcactccttcttccacaccaacattccacctgtgctcgcacgtacttagtgcttttctttcaatcaactactttttttttcctcaaaataaatgtattttaaaggaacattttgtatcattcccataaatgagaaaccagtatcccttgccagaaacaaaatagaagaaaagcctttaaaaagaaacatatttctattaaaatttaaaatgttcatttgtactattttaaaacagagagaggactctcccagccaatgcatgcctacctcatttcaggaaacgctggcatgggaaaaccaagggtgcccgcatccaggctgcctgggttcaaaccccagctctaaggagcactcggtagaagtccttgggaaagtcacctccttttcctatgcctcagttctctcacctgtcacatgtggcaataacaggacctacctcattgggttgcgcaactcagtgagagaatgtggggagtgtttagtgaatatgccttggctagtttggggccatgaaaagccctccagcattcgaaccagaagaggggcactgtctagtttgcatcttagaactagatctccctctggctgtgggataaggaggggccaggagagaccaatcagaggctgctgtggttccgagaagcaatgatggagacctgaagcctacaaaagggtggagaggaagatgcaattgagtactggggacagagaccagaggcaaagctggcaccgagattctaacgaggggaagcatcgggcccttcgtggagtagggaccacaggggttcacatatttctaggacaggatgtgtctagtacccaatttatataccttgacttgggggagtcagtgtgtccggaggcaggtgacctcaggccgggtgttcaggagtgagtaggctgcgcccatgggccaaggtcgggcacctcaccagcccccgcacccctggagctggcaggtgctgagtttgcatgaagtggttgtggcagccatgcctccctggtggtccagggatgagcaggggtcagaagtgctttccaggtggcatccctcctgctcctttgctcagtcctctgctggtcctttgggcctggtggctgccactgagccctccagagagtgccgggcctgggaccccaatcaggcttcagccaccctcagggcaatttccctgccatgtactgccctccattgcctcattgaaatcttaagaggctggggcactaaaggaggacaatgatgaccccaaaaggggtggaggaaggaactcgggaagtcttcccttcgaactctctaagatctcttctggcgtccaccgcagctgggccccttgctgggtgcccctccactccccctacctccacctctcgtctgatgtagaatcagaagatcctagattccatccccccagtagaagctcaggtcagcgctgctgtgagaggcccttctacctcgtgggtcctcctgacagtgtctgctgctcctctccgccaccattcactggcgcccagaggtgccccacagagaggagcttctcagtgggggttcctggaaaggagtggaggtcgcggttatccctcccgccaccgccaggcgtcaccaccagcctggaaatgaaaggcacagtcaggccggtctggacgccaggggaactgtcagcctcgggactggctgaagggcctgggcaggactggcagggtggccaaggacgtccggagatggctgccacttggcgctctgaccccaatgtccatcgggagtccagagaggcacacgcccctgaattcaggccgctgtggccgcgacacacgccaagcccgagggccaggtatgcagagagggtccagaccctggacgcccaccctgggccgcttgagtgtaaaggaagcgggaacttctcgccgtacgcgttatatagatctgtttcacaaataaagaacccgaggctcagtttcgtattccaagtggcaccaaccccatgacccgctccagtcgagactatttccagagatgcgatctcctagcacgacagcgacacttggaagtctgtggctgaacgagtaaatgaatgcgaatataacaacagccggcacttactgagcacctactgtgtgccagacgctgttctcagcagtctaaaatgtggatactcttatccccacgaagaaactgaggcacagagaggtgatgtaatttgccagacgacactgtggcaaatccaggatggggacccaggcgatctggttccaaagatcaaggtcaggctggtaacaacgcctctctgtagcaaatgctttatttttttgtttttaaattttttttagagatgaggtctctctcagtcacccaggcaggactgcagtggcgctatcacggctcactgcagcctcgacctcccaggctcaagtgatcttcccgcttcagcctcccgagtagctgggactacaggtgtgcaccaccacatccggctaatttgtgtgtgtgtatatatatgtgtgtacacactatatataatatataatatataaaatatattatatataatacataaaatatattatatataatatataaaatatattatatataatatataaaatatattatatatattatataaaatatattatatatattatataaaatatattatatataatatataaaatatattatatataatatatattatatatataatatataaatataatatataaaatatattatatataaaatatattatatataataaatatattatttatttatttatatataatttatatataatatatatataatatgaataaatataattatttatatatatacacacacacacctatatatatttgtgtgtgtatatatattatatatataaaatatagtatatataatatatataaaatatattatatataatatattatatattatatataaaaaatatattatatataatatataaaatatattatataatatataaaatatattatatatattatatatgtatatataatatgtaatatatgtatatatataatatatatatacacacacaaatatatataggtgtgtgtgtgtatatatatatataaataattttttttttttgtagagacggggggtctccctgtgtcgcccaggctggtctcgaactcctgagctcaagaaatccaccttcctcggccttccaaaatagaatactgggattacaggcgtgagccaccgcgcccggctgccattcggttttatcgttgtttgagtttttgttttgttttgtttttttgagacagcgtctcgctctgtaacccaggatggagtgcaatggcgcgatctcggctcactgcaacctctgcctcccgggttgaagcgattctcctacctcagcctcccgcgtagctgggattacaggcgcgcgctcccacgcccggctaatttttgtatttttagtacagatggggtttcgccatcttggccagactggtcccgaactcctgacctcaggtgatccgcccacctcggcctcccagagtgctgggattacaggcgtgagccaccgcgcccggcccgccattcgttttttaagttgtctttattaagcgccgctgtgcgccagaaaccgggagcggaaagggtctgcgccccagcaggcgagtgagcagagcgcgcggcgggcgcggcggggcctcaccttctcccgggccaagcgcccacaggaggcgccccgagtgcccaccaggtggcgcgctgacgccactcgcctcccacgcgccacacccgcttggtctcttcatcgccccctgcggagctggcgtggaccgcagcgacttgggtccagccgacaggtggccgagggggcagccactgacctggtgccaggtgtccctggctccctgccaggtgccctgcagtctagcggccctgctcaggccctgctttcttcccttgcttctcacctctgaagacactgaagtgtagcgagaaggagccccgcacgaccccttcccgccagtgcttcactggggacagagcactttctaccggctacgtgccgtctcacactcgccacgtcctcaccccaggaggcgggcaggatgatccccctttgcagatgaggaggctaccgcccaagaaggggagagactgcccccagatcaccctggccacagagagcgaggcccccaatccaggctgccggactccagctgccacgccctccccactccaccagagcacaagcaggagcgctcacagccaggagaaggtcccttctggcgggtgaggtcctgtgagaggcagggggatagacatgttgacctctcaggccagaggagggtgcgctctgggatgtcagtggcaacatcccttagggccttctgggccagaagttcctctgctcccctggctccctcgccccctgctcctgtcctccccgtctttcctcatcccttcctatgcggcctccccaggctttgctctgctctctacaagctcccaatactcacctcagatgactctccgggctcacacacctcccagtcttgtccctccagtctgacctctattgtgcaccctgctgttcacctgagcaccctcaagccccttgcaggccccctgtccaggatgagatgccacatcacccctgcacacctgtgctccctaagccagaatgctgggggtcctctttgactcctcaccctcatgtcctagagtctgtcccctctccattccacccattagacatctttcaaggtcatcccttcttcccagcagatgcctctgctctgatacagaccaccatcacctcccagcctctagtttcacccaccctctcggacccaccctccacgcagctgccagaatggtctttccagagatcttcctaaagtgcaaatccgagccgtgtttaaacctcataatcaaaacagaaacaaagacaccttaaccacaggatgaaaccccaaacccttagctagacccgtaaagccctgcatggtctggcccctgccacctctctggcggtgttgtgtccctctccccccactcactaagctcagctcccttcagctcctccaaagcaccaagttcttcctaggctcacggtctcagcaggtgcagcccctctgtccagctcttcatcctttagatcccagctgaaaggtcacattcttgcagaggcattccctgacccctcccaggtaaattaggatccctccttagtttctctcttgtttggaatttgctgttcttcttcccccgtacctcttgccaacacatctcagagcttatgttttcatgtgctcagttatttaatgtctgtctctcccatagcccaaattctccatgcaaataggactgcagtctcccctgtccacactgtacctccacaccagcccaggaccggacataaaagtagacacttggtaagtatttgtggaacaaatgaatctttcatctcgtcctcatcagaaccccattcccaggctttctttcatctctggcctttgcaagagttgcttcctctgcctggaaggttctttccattccctcccacctgggcagatccacacgtcatttaagattaatctctctgcaatctgtccatcgccccctcatttgaattagggtttccctccaggcccccttggaaccctatacatagcactctatcctaacactttaaaattgcaaattgcctgctaaacatgagagattaacaacaataatgatctatctactcttgcctctcccccagacctctccactgcagctagctcaagggcatcactctctctgcctttcaagccattaggaaccccatttcccattcattcatgaggcactgctcaggtgcccactgtgtcgcgttgttttccttccggcagcactggggaagcatggaggaaggaagcagtgtagataggattcttccaagggtgagagggaagcaggtgaaagcatcagaggtgctcagcaaaagcccagccacccccatccagggtgcaaatgggtgcagggaaggctggaggcagaggggtggacctaaagtgctcagttctgcccccttcactgagcacctggtgtgtgcagggcatggctggggagaggggtgaggaatatggagaggtgcacctgaatggcagacacatcacctctagcacagctgttagtgtgcttggtacacagagtttactgtgtcttggatctgtcttcccacgctgggagtagctggagggcccaaggttgggtacagttgttgtcaaacctcagccaaacctagtggtcacttttctgtctctcccttgccaggtcactctgctgtggctcattcccctcttcctgacactccccacacccagatctagaggccaccttcatcagcatcacctgggtaggggcaggagcttatataatatgtagtcctcggttcctgtctaccaactaaggctccctggggatgggaccccagaatctgcatgatgcacactccgcactgtgtccactctgcttggcaccttgagcgtgagaaccccacttctccagtggcttcgggatcagccccacctgtcctcctagcccctggctccctgttcctccctggaatcctctgggggttcttttcctctgaccaccttaccttaaatgccagggtgcccagtgctcctctggcaccctccatacctctagcaccccaggctagactttctcctgcccttgggtggccgacagcacccagacttgacatggcgaaagctgaccctcccaccctcaccacagaccccatccctctcctcccatctatggtacccacctcatcaactagccagcctgttgctcaagccagggaactgggtgtcacacctgactccttctctcccttcctgcctcaccacagcaacaaccaaatcctgatcattttgcctcctaaagatgccttcagtctccctgccccccacccccaaaccactgcatttgtctcctaatgatttcctctcctctccctccctctagtccagggaattctccaaaagcttttaaaatgcaaatctaactataatcacagcccccttaaaatccttcaaagattcctcataaacaaagatctcaaccccttgaccctccatcatctggtcccagcctcccctcctcccgctctgtgctccctgaacagcaaactgcttccagttccagcctccagacctttagtcattcagtgccctctgccaggaatagcccttgccagacaggctcttcctcacaactgcagtatcacctcctccaggaagccatctctgaccctctcgcccctgcccccagcttcctcagtgcatccatatgccttccttgttcaaggatctgttattccactcaccatactgagttacaattatcgattttcatgtctctgttccacacttgccgatgagatccttgagggcagggagggtgtcccattcatctctatctcaacccctggcctggcgcctggcacggcggacaggctcggccagtgggtgatggataaatgcggaggggaaacttgaacaaagtgagagccagaaatgaccaagaggggagtaagggcaagcctggcaggaggagcagccggagcaaatgtgtgggaagtggaggagcgagaacttccgtttactgcactcctacgactgcccaccagccattgtgcctgcgctttgtttgcacattttgtctcatttggttcttgcaagaacagatcaggaaacggacatcagagaaccaaagtaacctgcccaaggtcacacagccaggtctggaacagaatctgggactgtctggcctgaaaacctgtgctctttctgctgggccacacagctctcctagggacaggaccttctggaaaccagacaaggagtgggcccagctacgcccctgcctagctgagcgccggaaccagctgcccacactcaggccaacagcttctccctcccagccagaccagaggcttagaggccaaacaaagatttgcctgttcctgcctccccggctttgggggggtctttgactagacatgcacgccaccacccaccccaccccccaccaacaccaagaaagagctgttgcatcttggtatggcccagggtgcctggaaatgcagggggctctgtgatgctgtctgggttttgcagaatctgtctccctcatcgcacttggcccaggctgatattaagattcatctgcattccccgcgcacccgcctggcagatggtgggggaggaggctgggtgcgtgccggggttgcagccacgggaccaagctgggccttggagggccacagagcagagtgcccacccaccgtgctccttgggcccagcccaagctgggaccacttcaaatgatggggtgcctcctcaccttcatagcctccaagggatgccaggacttgacctttcatttttctacagactaaagggaccctggaattccaggagggagacctgaagatatggagtgggggtgatggaggatgggcccccatctttgggaatctcagatcagggtcgtgttcttcctccttgccctggaggtttgcagagaccccactgggacaggagccactctcggcctggtgacccctgtggcatagagagggtaagtagtgaataatgaagggacaggctccaggaaggccttgctcccctcactctccagcttctcaggacctgcccccggccccagaatctagcctggcccctaacagccttttcagcccaggggcccagccaaatacttcctgtcacagtggctggaccgagaaggtccagggattatctcagcccctccaagtaaagtagaagagggaaggagcagacatcataacaaaaggagtgcaggctagacacccagaaggacttccctcagcacaggttttggctcttagaatgggttttttaaaaaaaggatctttcttaattccaggactcctgagttgggggcagggcagccgattcttgctgcccgctcccggggaacgggcgccctgcaaaagaggtggaaacggtagggtccgtatcccctggccaccaccctctcccttcctctccaagagctactccgcccccgcgtgccgtcctctcctggctggagagccggcgtcctaggtccccgggctgcgggccggcaggggaggagttaactccggaggtaccggctgggctcactgtacctgccgccgccgccgccgccgccggtgggagggacgaggaagcgggagccgcctgggcgccaggagcgctctagtctggcggggcgcagcgcagcgcggggagcgggcggccggggctccgcgcggctgggggcgtccgccagggggcgcgccgcgacggggcgggtggagcagcctggtttggggaattagcaccaaggacgggcgcgcgcgcaggtccccagcacatctgggcgagagcggcgccgctggagccgaggggggcgccgagcgcagatctggagcagcagagccacggcgcagctggggcccttcgaggcgctcggggcgcacatctgggacctcgagcgggggccgtgccgcgcgcagctggaccaggggaggggggcggcggctgcacagctggaccgaagggggcggggtcggccctgggcgacccgctgaggggagggccgcgggccgccggggactggagcatgggacggcgcgcctgaaggagcaggaaggggaaggaggcctgggaccccgaaaagagaaggggagagcgaggggacgagagcggaggaggaagatgcaactgactcgctgctgcttcgtgttcctggtgcagggtagcctctatctggtgagtggtccgaggggagctgcgcagaggggcgggggcccggaggatcgggggagagcgcgggaagcttgcgagccctgaaactttctcccttcccccgacatcccggggatggcggggaagactggaggctgggggagagggcgggtccgaggccggagactggacagatagggttaataggggcggggagagggtgcttggctggcccacccactccgcagcgggtggctggaggtgcgaccagcgctcggaaaaaggcctggagccgggtcgccagggttaccctaccccttcccagagcctcaggaccgctgaagccgggggcgagtggggcgcgggtcgtggagctggtgacctgcaggcttttcccctgacctctgggactcagagagcctcgggttctgggtcccccagagcacagagccggtccaggcggggggcggcccccgcgtccctcccctcccgccttccctcccgctccctccctccccgcctgttgttttcctctgctctcccggctgcgcgcagccggagccccacaggacttgggcaggcggctcccgccccaggcactcgcggcagctgagcggagcgcccagagcccgctccccgtgcgccggctccgcggcttctcggcgacccagggcgccggggatcccctccccgaacccagcccgtggcttaactcccctccgaccgagcgcccgctgaccctccccgcaatactgtcgtgaagcctcagccccacatctggacctgcccctttaatcaacaagccccttgccaccgccccatgccactgtgggaagagcccttcccttctcacggccccacctttaccctccagccactcagccgtgaccctcaggagcaagtacctacaggtctgcagccctagacccagaccccgagcctcccgtcctagccgtccctctaccccacctctggggcctggcagtcagggccagcctgaactgtggggcagagacagactcggccacagcacacagctgccggcaacacccaggccagaacacaggcatgaggaccccacagccccttggaaccctactgtccccaccccagtgtcaccaccaaatccagatgccccccggtgctggtagtaaagacacctagggcaagtggttgctttcaaaagctgagcaaacccacagccaggctgcgcctcaggaagccctgtcaaccccctgatgccccccactgctgtcccactctccctgtggcacctccaggaatctcccaggtgtgggttgtcaccacagctgatccagcagagggaggatgagcccctgcagattccagaggcggatggcgcctggataaaaaccctttcaaaaagacacatctgatctgtgaggccaggagtgtggagtgtaaaggaagggctgaccctatgtgaactcagccttgtagtgttgtaatctctgagccccagtgtccttatctgtgaaatgggaataagaactcctacctcagaatgcaagtaacatcgtggcatgtcatcatcagtgtaccctggagaggtgtttggctttccattcccatggccatcctgggtgtggcattcactccgggtctcccctagttctcttgccaaacctaaactatattcgtgcttgagaattacactgtgttctgctttcttattccattgtctggtggttctctttgcatctaagggtagaaattatcctagggtagggacggtgtcttacccaacagactaggaagtcccaaaaggcaggggctggcctctcctgtcaaaccaggggctctcccaggataagaatggtgcttccctgtctgactcggggctgtttcagagcagagattatgcctcccccatcagcctggggatttcacagaggcagggattctacttcctatcaaattgggggctctgtcagcacagggatgatgcttctgcaattagatgggggctccccaagatcagaagctgggcttcccccatcagactggggactccctaggggtaggagccgttgtccctggtgccacagttcactggagagaattattgtcggtctttgagactttgaatttgaatagtggccaagacagtgaggaaaggacaatgggggggggggtgacccaactgtcagaacctgagatgtacacaagctagagtgtacacttgccccccagcttcagtgggcaagacgcaggagctcctcacccaggtcagagtgaagtggcagggacaggggtactgctggtagcgggggtggtggacctccagggacagggctctcactgtactcacaactccctccataggtcatctgtggccaggatgatggtcctcccggctcagaggaccctgagcgtgatgaccacgagggccagccccggccccgggtgcctcggaagcggggccacatctcacctaagtcccgccccatggccaattccactctcctagggctgctggccccgcctggggaggcttggggcattcttgggcagccccccaaccgcccgaaccacagccccccaccctcagccaaggtgaagaaaatctttggctggggcgacttctactccaacatcaagacggtggccctgaacctgctcgtcacagggaagattgtggaccatggcaatgggaccttcagcgtccacttccaacacaatgccacaggccagggaaacatctccatcagcctcgtgccccccagtaaagctgtagagttccaccaggaacagcagatcttcatcgaagccaaggcctccaaaatcttcaactgccggatggagtgggagaaggtagaacggggccgccggacctcgctttgcacccacgacccagccaagatctgctcccgagaccacgctcagagctcagccacctggagctgctcccagcccttcaaagtcgtctgtgtctacatcgccttctacagcacggactatcggctggtccagaaggtgtgcccagattacaactaccatagtgataccccctactacccatctgggtgacccggggcaggccacagaggccaggccagggctggaaggacaggcctgcccatgcaggagaccatctggacaccgggcagggaaggggttgggcctcaggcagggaggggggtggagacgaggagatgccaagtggggccagggccaagtctcaagtggcagagaaagggtcccaagtgctggtcccaacctgaagctgtggagtgactagatcacaggagcactggaggaggagtgggctctctgtgcagcctcacagggctttgccacggagccacagagagatgctgggtccccgaggcctgtgggcaggccgatcagtgtggccccagatcaagtcatgggaggaagctaagcccttggttcttgccatcctgaggaaagatagcaacagggagggggagatttcatcagtgtggacagcctgtcaacttaggatggatggctgagagggcttcctaggagccagtcagcagggtggggtggggccagaggagctctccagccctgcctagtgggcgccctcagccccttgtcgtgtgctgagcatggcatgaggctgaagtggcaaccctggggtctttgatgtcttgacagattgaccatctgtctccagccaggccacccctttccaaaattccctcttctgccagtactccccctgtaccacccattgctgatggcacacccatccttaagctaagacaggacgattgtggtcctcccacactaaggccacagcccatccgcgtgctgtgtgtccctcttccaccccaacccctgctggctcctctgggagcatccatgtcccggagaggggtccctcaacagtcagcctcacctgtcagaccggggttctcccggatctggatggcgccgccctctcagcagcgggcacgggtggggcggggccgggccgcagagcatgtgctggatctgttctgtgtgtctgtctgtgggtggggggaggggagggaagtcttgtgaaaccgctgattgctgacttttgtgtgaagaatcgtgttcttggagcaggaaataaagcttgccccggggcactggagtcagagttgtccaaggaaagggcctcaggcatcccttggtccaggaagaatttctctgatggccgcaggacatttgcttgagacccaagtggcagggatccaaccgcccttggcgctgatgtttgctgagggctcagggcttccctctccagccccggttccaagctgtctgatcccccacgaggaaacttgagcaaacaccctgggctcggtgctggaggagggcgtagcatcttcaagaacagctcagggagggagagctagcaggtagaatgggccaatgagggtgttccttggtgtcctccctgaactgccatctgcagacccagcagggtcctagccccgtcattttgctgcgtggccttggccatgtccattctcctctctggctttctttctttgtttcttcctctatgacatgaagggcttgcccagaccaggggttctcaaacgcggatcacccagagggtttgttaacacacagatttctgggtcctacccacatttctaattcagcaggcctgggtggggcctaagaattagaatttctaacgagtgcccaggtctatgctgatgctgctgctccagggcccatgctgggagacccactcaaaggaccttgaagttcatctctggctatggctccgcaggagggggagacacctcggatgtgatttcccagctgtaatttccatctgcttctcctggggaaggggcctttcagagaatcggggctattgtattggattttcaatctgaccacatgccagtgaaggaacaggctggagtggggtgtggacacagggcctgcgtcagtcactcccctcctgcagctagtaagaggcctcagaatggccagctgccagtggcaccttgtctgggagttagttgggccctttgggactctgtgaagggaagacactaccaaggtcacagtgccttctggaggtcattctaagtcggctctcttgggagggcagcactcagggccctttgggccctcttgaggagaggagagtcctggcagtaaggtaagatgggcttgccaccccccacctttcgcccctgcccaccagcgctccgcgcaaactggtcccctcatactgcagcgcagagttgggtggggctgagaagccatctggttacagcccaccttgtaggaaatgacccagcttgtttcccccacatcatgcttccaggggccgtctctcctgagtggagatgtgagacacacacccctcctccagaccaccctccgctccccaccctggaggcttgagactgctggcactggagcagcccaccaatggacacccaccgtgtgccgttcagcctcccacagtgctgtggagactgcaggaaggaggaggaagcaatggggccagaggccctgggcgccctccccacctcccctggctgaactctcagcaggcactgggggcactttgacccccctcctgctcctctcctcctgtggagagccagatgctggcgacagctggagggcccggccttcctggcacacagttctgcctgcaccagggatggattcattttaataacttcatttcaccctcatgcacactgccgcctcatccctcctttccaccttccccagtagcctggctgctctcctcagctaggacttcgctaacagatttcctcccaaaccttaattctttggaatagccctctggtccctactgttcttgccagatacttctgtgcccgcttggtcctcacaagggcaaggggtccatccaacttcctctggctaagaagacgtcacctctgccccattggcgagcagtgtccccatggtgatgcccccccaccatcacgacgaagtgcgctggcctcccactcttgccatgcacacactcacaggagattcctctgaagaaacctgtccccactctgcccagaccccaaagggccaggtcctactcacactccaacccgttgaccttccccatccactgcccttcaaggcagtctgaaatgccctcagaccgtttagcggtcccgtggtcctccaccctaacccctcagcccagctgggggctgccgggggccttgtctcctccatcagtggagcctctgggacaagtttaccaggctgggggttctttaaggacacagcttggatctccccatcaggctggggaacacctagggccgggggccatgcctccctcatcagactgaggacaccctgatgtcaggggctggatggccccttagactgggggtccctgagggcagaagctatgcctcccctcatcagactggagtctccctgagggcaagaactgtgctatggatgggagggggacagcttgccttttcctaggcatcagagcacctggaggctgcctctgcccttcagctttgctcaaaggcgctgtctgggtctcagcattcctttctcaagtagggtgaatctcctagcactctgtgaagctaataagggggattacccgttaggtcaactggtagcaatgcccgagtctccttctcgatgaagcttaaggcaaaagcaaatgaatatctaggtcccttcccccccttccccccttccctttcctgggatgagcaagcgggaactgagtcaccctgttccccatccttggcaggaatgctggtgaccttgcattgtggcagattcaggtggcgaggcccattgctcgagatgcacctggtgggtgggtggcagggatcctgggggagtgtttatggggacggaggcagctgaagggcagggaggggtgaccaggtgctgggatcatcgagtgagtatgtgcaggagggattgtagagacacaatgaaacagttgctctgtgttgggaagtgatccagtgtcatcgctgggagtgggagacagaaatgttacttccaaagattccgagtcctgtggtactgccaggagaaccgggggctggggtgatgggtaaggagaggcaccattagccccgccaggcagaggcaagatggggtgggggcggcacctgccaattatgccaaagtcttggagtggcagctggcaccatcaccaaggcacaaatgccagcagagacctggcactcacctgggttgtgattccatagggcccctgtctcctgttggtctcccaggctcaaaggctgacctgataattcaagtgaaggatgcctagttcaaggcctcccagttcctcatcccaggccacctggtcaggtggtcccaagggacaagctaggtcctcctgaactgcagaggctgccaataaactggcaacacaggtgttgcaggaagatatagctgggtcctcatcctgggtctgtaatttattagacgtgtggctttggacaaatgacataatttcccagagcctccttagataaaaaactagggctttgcttaccttggcgtattgttaggaaaattaaatgagttgctcaataaatgttacttcctcctgtctttttttttctaagatgggttgttgttaaccttggccttgctcctggtgtggacaggggaaagggtcccaggctggaggtaggagacctaggttcctatcctggttccaccccatcatgcatgtggcaaagatttctaattgtcccataatacccattttccctttctccatagtaatgggattctctgattttagctgggcatgtggctgcctgaaataactactgcatttctcagcctccctagatgtagtcatgtgactaagatctggccagtgacatttaagccaaaggtttaggtggcaccttccagaaattgtcagacagctgatgtgcactcttcgtccctttgttccaccctctatcctgcagcctggaataggtacgagactgctgccatcttagaccggcggtaagagccacaccctagaggtggcagagcagtgagttggaagaagtcttggtccctgggaatgttgtggaatagaaataccataccagggccaggcgtggtggttcatgcctgtaatcctagcacttttgggaggccgaggcaggtggatcacctgaggtcaggagttctagatcagcctgcccaacatggcgaaacctcgtctctactaaaagtacaattagccaggtgtggtggcaggcgcctgtaatcccatctactggggacgctgaggcaggagaatcgcttgaacgggagaggggggatggggatgtgggggagtgaggggtgggggagtggggggtcggggggccagggggccagggaggggttgcagtgagctaagattgcaccactgcactccagcctgggcagaagagtgagactctgtctcaattaaaaaaaaagaaataccataccagccctaggctgcctgccttcagacttttatgtaagagaaaaatcaaaaacaatttttttttttttttgaaacggagtctcgctctatcgcccaggctggagtgcagtggcgtgatcttggctcactgcaagctccgcctcccgggttcacgccattctccttcctcaacctcccgagtagctgggactacaggcgcctgctaccacgcctggctaattttttttgtatttttagtagagacggggtttcaccatgttagccaggatggtctcaatctcccgacttcgtgatacacccgtctcggcctcccaaagtgctgggattacaggcgtgagccaccgtgcccagccagttctatcttatttaagtcactatgctttgggtttccctttcttgcagttaattctagctcctcctaagtcagtggatgtatttgggcactttacttacatggcctcagtttcctcatctgtggaactgagataatgcttacatcttggcacacaccagagaggttttatagactcacgggcaagaataaacatggaaggctctggtcctcctccctgtctcaaggcacacagcctctattttgaggggagtagcaaacaagttgctaccgtattgttgggagccctggaagggctcaggaggattctctagccctgaaaggccttagtccccaaattcgtccctgacacctctgagtcccatctacattctgctgttggtgacacacaatcctcattaagggcctgaatgatcccagccagatgggatcctaatttaattaaaaccctttaattacctgcaacaacactgctttggaagtccaatgccttaaaagggccctgtgatgggaggggcaccatccacagggcagagtagtggctgcccttttagcactgagggaacccagggatgcaaggtgtttctctcaccccagtgggcatggaacagccagtgtggtccaggcttctggttggtttatagggtacagccaagcaggggagtgcatgaaccaggcccttgggagcagagtaccaggctcttggcctgaagctgtcagtgctggttttgtgctgacactgagaccagtacagcctgttctggtcaggtctgagcactcccaagaccctgcccctgcaggacactccgggtaggagcaggcatggctctaatttctcctgaatgggctggcttaagaagcagcagttacctctgcaaccaccaaaggaaattcgtgcccttgtgaacagggtctttcttcaagatgtcatctacttggggaggggcgatgaaagggagtaacctgagtgggctgcagaggggccacatggtttcttggggacttataaggactgctcattttttttgttggtggtggtttttttttttcaaaacagagtctcactctgtctgtcgcccaggctggagtgcagtggcatgatcttggcttaatgaaatctccatctcctgggttcaagcaattctcatgcgtcagcctcccaagtagctgggattacaggtgtgaaccaccatgcctggctcatttttgtattttcagtagagatagggttttaccatgttggccaggctggtcgtgaactcctgacctcaggtgatccgcccacctcagcctctcaaagtgttgggattacaggcgtgagccaccacacctggtctcttctcgtggtcttgagcctcaactggcttctcctgatagaggcagaaagaaggagcccagcccaggccagagcctgctaggccttggcaaaggcagactcagaaacccagacctgtaagctgggctgtttgggggatatcatgtgttaatacgccctcagttctcccttagtactgagtccttcaacaattgcttaattaacaaagcctctgaaagttccggctggtcttccctggcccaggagatccaggtgaaacggctttgattcacacctgagccatagtcttaaagcaagagaaatgttctactggagtcagtgtgatatcagcagctggaattgaaccaacaaatcccaaaaggaaggagaaactcaagagggaagagctaaaaccaccaggccccaccattccacaccattccacacctcaaagattcttccaaagctaaagccaaggaggctatctacatgctttattgaacaagccctccagtaccaagccctctgtgctcccacccacccatcctcttcctctctcctccagaatcctgcttcagttaccctcatctcacttcccctgctgtccctaccattcacagcctctgaaaagcctgttgctacccctggactcaggttgtctgaagtagtgtctgcagtgccaacctgcagactctctgagcaggaaatgtggatgtcccctctagactagagacggggaacaggagtggccttccccttcggaccagagactccctaagggcaggggctgtgtgcccctcaagactcaccagaggccgggtgcggtggctcacgcctataatcccagcactttgggaggccgaggcgggcagatcacaaggtcaggagttcgagaccagcctggccaatatggtgaaaccccacctctacaaaaaatacaaaaattagctgggcatcgtggtgagtgactatagtcccagctactcgggaggctgaggcaggagaatcgcttgaacccgggaggcggaggtcgcagtgagccgagatcacaccactgtactccagcctgggcaacagagcaagattctgtctcaaaaaaaaaaacaaaaaaacaaaaaaaaaaactcgccagaggcagagtggcactccctacagaggtgcggctgataagctacctgcatgcaggtgctgcggctcatccaactctgcatgagaggtcatccctgctgtgcctcactggcctgctgctgatgcatgatcacagcctcagcccactaatgtgggagaggaagtggcaacaggaagacagactgctgcacggtaggcaccccaaattcccaggtcctcctggccggaagagcaggtgtggcaggaagggtgaaagtgggaaaggatggtggcatgccagccagtgctgacacacccctcctctcacctgtccctgatattgtatgttgtcttctctagaaaggctttcagagacccaggttggctcctggggcgcagtgaggggcaggtctcaccctgaatctcttagtcagaagagagccaaggcttctggctcctaaccaagtgactttttcccattatgccaggcttcctcgccccagatccccttcatggcttggcaaagaaagccctacttggtcctagggagcctggactcccctcactttggggtgaaggcaaaggtgtgccaagctgggatatgtttgaagacagctgtgtctgagtcttcattggcatgtgatcatctacccaccttgcctctctgggccttggatggcaattcttcccccacctgctcacatggtccctgtgagggccaaactggcccagtggatggtgagccccacatcactgtcggccccagccgctagtgctcacaggcatccacaggaatggggagagggctgggtttctctttcttttcagggcaggctatgtggcacaacagctgagtgcacagattctgaagccaggttgcgtggattcaaattcgtgccctgccacctcgtaactgtagaccttgggcaagttactgatcatctttgcatttcaatttccgcatctgtaaagtggggatgcttgctcctcgcagagggctgttgtgagttggagctgtgtttggcacaggggcggtgctcaagaccagcggcccaatgacagctcatgatgcctgtcctgctcctgccaagcctgggtgggaggtagggagaagagtggccatgggctctatcattccttgctgcatatcctagctgggcacagctttgccttcaccccaaagtgaggggagtccaggctccctaggaccgagtagggctttctttgccaagccatgaaggggatctggggcgaggaagcctggcataatgggaagaagtcactgggttaggaagaatgtgcaggaaaaaaactagggaaggtcagaagtctgtcatgtctacaaaagatgacacataaaaaggaatctacttttgttttccttgattctggcccaaaaatggggcactcggttgcattccctctgttccttggcccagcatctcacttgtgcaagcaccagcccttccagtgcactgagtggtttcatctgtgtaccaccctctggacctctacctgtaaacaaacgaggctcagagaatgcaggcaactaaaggatttttatttagggacccagagagctgtccaacaggcacactctccaggcaaggggaccctcctgccttaccttgccctgagtcctggccccagtgccctgtcccccaaccatgtaccgataacccagtgccctccctctctcctcacccagcctcatcaccttcgcctggcagatcagtttctctaggcttggatggccccatgatcccttgctggtaccccctgtgaatgcgtgtgtgaaacatgtccctgtcttggactgtatccttgagggtgaggaccatgtctgttctgccacatagtgagtcccctgaggacagggccttttgtgaccctttccttccatactttgagaagggccaagtgcctcgggtacacacagggcctggctagtaaatctggttgactcacagatgaactcaatacagtttctattgtgggaatctttcacagggacagggagaaagagaagggaaaagacagaggtgaggaggcagctacattctgccatgccacgctggcttgggtaaatagagggtagacggggcatgagtgtggaaaggtatataatgcccccatttcccagtcttggcagctcccaggcctgggagaggagggggcctgctgccactcagtcaggctctgccatctgccacatctcagcagagatcagaactggagggctcattgtaggcaggttttgttttttctctaaatgtggcaggatcaggctcaagatgtcactctagtgagcaggactagagatggggagataaatgtctacgaaaataggggagaaataaatggaagcttctatgttccagaagagaagaatgggggcaaaaaaagaaaaaagaagagaagctaaataagatagtgtagggaagatgggctcgatttagcaggtttgcatccatctttccccagccactcagaaggcagcaacagcccaagacacaggactcctgggtcccaagtgccttcctctcctcaacccttgtgttttttgtttttttttattaaaaaaatttttttagagacagggtctcactatgtttcccaatctagtctcaaactcctggacaagggatccgctcgacttagcctccagagtagctaggaccacaggcttgcgccaccatgcccagccccaactcttatcttatttttttgagacggagtttcgctcttattgcacaggctggagtgcaatggtgcaatcttggctcactgcaacttccacctcccgggttcaagcgattctcctgcctcagcctccccagtagctgggattacaggcacgcgccaccacgcccggctaattttgtatttttagtagagacggggtttcaccatgttggtcaggctggtcgtgaactcccgacctcaggtgatccgcccaccctggcctcccaaagtgctgggattacaggcaagagccaccgtgcccagcccccaactcttattttcatacctacaagccaaactgcctctgccatgcctctgagcttcctctctggaatgcctaatctcctaacttttggagactgtaacaatgatgacagtgatgatcataaatgaagaaggaaagagtgatttccaggtgagtgaaagatttgacacaggctctttcctgggacctctgcggactctccctcttccatatcacaacaggtaagatacctggaaacttgcaggacgccaggccagctcgtctactcaggatgctttttccagagtgaatcctactcagaagattcccacactcccaaaggtgcccattttagtgtctcattacagatttttattccaatctaagaaatccttacaggaactggtctcagaaggccatatatggcttagttcagaaacaataatatagcaatagctataatcttagtagcagtttacctttctgaggcctttattcaatgctaggcaccatgatgaagatgtgacatgtatattttcattaattccccacaagaagtctatgagatatacccattttacagatgaggaaactaaggccaggatcacgagtggtggcaggagatggaagccagactcctagactccaggtgtgtgctctccaaacacctgccgcggctgggcccttggtgcagcctgcactcttaccagctcttcttcaacagctagttcagatcatgtctccaaaccccaccctttcccagttctcagccactgaccttatttccacttaaatctgaaaaacatacgacaaacttgctcaacctcccagtatcagacaaacccacttatttctgcaggactctcctcacatctagagagaggattcatccctgcctaagcccacttatctgttccttctccagcactcttagaacctgaaggcatagactgtccccgctgtaccggatcctggagtttcgactgcttcctctctactggatctttcccatcagctttaaacatgttacgtctccttcattctacagacaaaaccaaaacactcccctcaacgctttttcctcctccaattattgtcctttgtccttcccttcacagccatgcttcaaaggcttgcctgtctccagttcctcaccttcccccatcagggtcccttccctgaaacggcattggctaaggtcaccaatgacttccatgttgttaactccagtgggcatcttttactctcttattcaacagttttttaaaaaattcttttaaatctggttcacttaactttgtatttccttcatatagatctctggccacttctcctttgtggcgtatcttcctgtactaggctttaagtataagaattccataaagttcagtcctgggccccctttctcctcactctacactcctcctcagtgatctaacaccccaggatttcaatggcacccctaaaactatatctcccagaaccatctctccagtcccaacctctcttctgagctctaggcttatcaactcaacagcccatgtgatacctccatttggatttctcaaggcatctcatagtcaacaagtaaaataaaatcaatgacctgattgccctcaagcctgtttatcttcccattggtctcacttcggtgaatccatctattcacacaagccggaaacctcttcatccttactctgtccaattcatcaagttctgccaaatttgcttcctaaaatccctctcatatagatgtactcttctccagctgcgccaccttcctacttcaagttctgtcatctcttcccttcttccacccccaaccccaatgctaatttttccatactctagccagagatcttattaaaatgcagatcttgtcatcccctgctgcctaaagctcctccatggctttcccatcgctctagtttaagtatctaaatcctaatgtgacctacgaaggttctgccacggcttccaacttgctctcacacctctccacactctagccacctggcctgccctaggctcctggaacaacacactaagctccctcctgcctcagggttttatgaatgcaatttctgtgtgtggaatgtgccttcccaagtaccaagctgacagctcctcatccttcagttctcacttcaagagctgatttcttagaaaggcctttctggattccccagacaagatagttccacgcagaggatctcacagtaccctacacatttccttcagggtgcttaccatgctttgacattatttgtgggattattaaggataatctcgtcccattagactccaatgactacagggagcagttagttttactcactgttgtatccctagaaactagaacagtccttggcacatagtaaatggaatgtataaatgaactattagcaaagaaaacaaaaagagctgtaaaaactcttggccaaaccaaggcagagattcttaaatattggtgggagaagaccctcgggatcacctgttggcaggcgtgctgaccactctcaaatgcccttttcttcttttaaaatgaaaaactgttgttcagagataatggggcagaaaggatgcaactacggagaaaactccatggaatcactgaagattatgttggataacatgtcagtcacaatgtctacttttcattagtgtttcaataaaatacacacttctggctgggtgcggtggctcacgcctgtaatcccagcactttgggaggctgaggcgggcagatcatgaggtcaggagttcgagaccagcctggccagcatggtgaaaccccaggtctactaaaaatacaaaaaattagccaggcatggtggtgcatgcctgtagtctcagctactcaggaggctgaggcaggagaattgctcaaacccagcaggcagaagttgcgatgagctgaaatcacgccactgcactccagcctgggtgacagtgtgagactctgaatcaaaaaaaaaaaaaaaaattacacacttccaatactgataagatatagaaattttaaaatgtgttaatttaaccagagagtaaaatatataatacaacaggtatcagtgtcaatgtatctttcgatttctgaaaaggcagtatttcattttgcttttaaactacataaatgtattatttttgtttcctgagacagggtctcactctgtcacccaggctggagcgcagtggtgctcatggctcactgcaacctcaaactcctcggctcaagcgatcctcccacttcagcctcccaagtagctgggactacaagcatatgccactgtgcccagctaatttaaattttttttttttttgtagagacaaggtttcattatgttccctaggctggccttgaactcctgagctcaagcaatcctcctgcctcagcctccccaagtgctgggattacaggcatgagtcactgcgcccagtccataaatgcatttttaaaatgctatgggtggccaggcatggtggctcacatctgtaatcccagcacttgggaaggccaaggcgggtggatcacttgaggtcaggagttggagaagagtctggccaacatggcgaaaccccgtctctaccaaaaacataaaaattagccgggtgtggtggcgcacacctgtagtccagctactggggaggctgaggcaggagaatcgcttgaacctgggagaagtccgaagtgagccacgatcgtgccactgcactccggcctggtgacacagcgagactctgtctaaaataataataataataataattttaaaaaatgctatgggtaacaggagatgaggcacacaaatgtccagtggtgtgctggagctggttcacactggatctctagagataatcattaaattttcaggaatttgagagctggttgctaaacagccattattaaaaattcaattatactaacatacaattagtaaaggtaataagtacccaagacttatttctttctaattattttacattttactactatccatgctcagctatggtgggctgtgctgctcttcccaactctgcttcagtgatgtcattttagtgatccagaatcagccatggtggcagtgtttacaccgtgggaactggcaatgctgccagccgggcttccatgtctgggaactgaatggtgtacctttatagcacaccaagaaccaaaccactggcccatgaaaacatttgaaggtctgaagcaaatgtttacttggaagatgaataggttaaaaagtaaagaaacatgtcagctgggcgtggtagctcatgcctgtaatcccagcactttgggaggctgaggcaggcggatcacctgaggtcgggagttcaagaccagcctgaccaaaatggagaaacccagtctctactaaaaacacaaaattagccaggcatggtggcgcatgcctgtaatctcagctactcgggagcctgaggcaggagaattgcttgaacccaggaggcagaggttgtggtgaaccgagatcgcgccattgcaatccagcctgggcaacaagagtgaaactccgtctcaaaaaaagaaaaaaaaaaaaagtataaaaacatgtctttaagaaatccttctcaaaattgtgtaagggttgaaggcaatttcttctcaacttaaagctacagttgttctacaacatggctttcataacaaataccacttactaaagtgtccatcgtttataggacaacctgtacaccattacttctagacaaaaacaaatgtgttgactagattgagatacaaatcctgaagagtaggagagatccccttcctctctccctttcaaacttctggaaagaggagcttattctcaatctatgttttctcacctccttgtcaggcttggctcctgcctccaccatttgactgaaactgctcgaaggtaacccttgacctccttactgctaaattcaatggcttctttttagtcctcagttctacgggctctctggtttatttctgcctcctccattagactgagttaatagaacagaaatcctaccttccatactaggcttagcctagcacagtgtctggggcctcctagatgctcagcaattgtttgctcagtggctggaaatgtaatctctgtgaccttgggcatgccacctcacttccatggatgtctgttttcttagacatgaaaagaaggtgaatcatgtgggaccccttcttttttctccttcagtttgtcgagactcacctttaagggtcttgcaagggctaaaactctccccctgctcgcctttttttttttttttttttttgagatggagtctcgctctgtcacccaggctggactgcagtggcgtgatctcggctcactgcaacctccgcctcctgggttcaagagattctcctgccttagcctcctgagtagctgggactacaggcacatgccaccatgcccagctaatttttgtatttttagtagagatggggtttcaccatgctaggcaggctggtctcaaactcctgaccttgtgatccgcccacctcggcctcccaaagtgctagttacaggcataagccatcgcacccagccaactctccctatttcaagtgagcgttataagtggatgtgtccacttttactaccaggcaaactcctggattttcaccttctctttggtccttgggtctaagctccaaagctttccctttgcctcctgttgtttcttggctcagagtcaggctgagtgaccttgaggaagttacgtagctatcttcccaagctatacaattggaatgaatgggagctgtgcaagacaagctggcaaatgtttagaactcctgtgagatctgtaaactgcaggtattggagctacatccccaaactagagttacacatattttatcttcgtaacatttctcccctggagttgatccccttcaactccttaatcatttcagttgcttgcactgaattccctcaagtctaaaattctttttttcctagagctgcagaaatcaagaccaaacagtattccagatgccactttctactccagcaactataggatttacagagggggagggatcatcttgctaatggctcagcagcataaagatcccatcagtcaacaacattcaagttcctgttctcatccggaggtcaaagcttctggttctcccaactcattatcccaaatactgatcatcctacatttgctttcctgctcactgtctccatgaggtgtccatctattgggtcaaaggccccaacatggcgcggtcacctctgaaattaaaagaaggaaaacgcattcaccttgtgcatacacgtacataaagagcagcccaacgatactcacctgaatgttagattagtcagcaagccattagaaatgaatctaaatgatgtagggcagagttcagtgacaagtcaagagataaaggaaacatacagggctcaggctgattaaaaagataattagttgtggaaaataaggttgggctccagcccagaatttgtctttgacaaagataaaccaaaggctttgatacagtcattttggggggatttagttgttcttttataggagttgaagagcaagaacaaagcaacagtcagtttcaaagtgcagctcaactccccctctgtttgttgttctgctcataaacatacaagctgtttcctttcatctgcacaggctcatacaatatggagatcccacaatagatttacaccagatttaaagatgaatgtgcagagctgtggtcaagccagggatcttccggcctaagaaagatctcaatgtgcctggctggaattaaaaaaaatacaagagaaagctcttcaagacctaaaaggctttaacagtgaaaaagaaaagaggagcatctcttacccaaattgttaaaacccacaaaggtgtttgagatgcctagtaacaatgcaaagagctttaatctttacatagggaatggggaaaattttccataggtggtcggatatatggggtaagctgacaacacaggggaaggggagatggggatgatgccagatattctatgtggaactgaaactgcaactccaatggttctgcgaaactacttgcccgaaatactgttttgataaataagccatatcctcgtggaattgaaatctccaactgcttcactggcacggacatctctgcagtgacagctcatgccccagattgtggagttaacttgaattaaatttcagatgtgggggagctaagggaggggggtggtggcagtgggaggtttatgaacagtatgctggggctctgatgttgtcataaccagatggcttcaactgtatcatttaaaacaaaaacaaacatgtccagaaagaatgaaataatgacagaagcatccagtagctttacctgtacctgaaatcccaacagctttgtacccacagtaaagcccaagttggaaattccataaatattgaagatcccagaagagaccttcatcctgacagaagctaggtgccaggactgctgtcctcctgagggcatagtccctgaactcaccagcatcccaacccacagctgtctgtgaatgaagaggaaagcaaatctgaagcctggtttgtccttctggaacctctgaagaacaggccagcagaggcacctttccagagctttgttcttgctattcccacaggaaggaagctttactttcagttttgtacctaaacatttcagaaatggaacttcctccagttaattacgtaatcttcaggatactccattagaagatctggcattcaatagttgtatgatctgaggcatgtcccttctctgggtttctgcttccctcatctacacagtgggaagatgccatatctcacctgtcccaccaagttcgtcaagttgttgggaagttcagatgaaatactgtatataaatttagctggaaaaacctaagacgatatgggtagaggagactttgagttcgcccggattcttggacttgtgtgctgatctggaaagctaggatggaggaggcacaggacagcagccagcagccagcagccagcacatgcagaactgggtacttcctcacacaggggacgcttcccaggggaaaccgggaattgcaatggagtggtttccaataaactaatcctgcctttgattatgttagtaacagatcatatttatccattctagaggcagtaagataaatgaaaagtcggaaaatgtacaaagtctaaggtccactgaagggaaatagaaggagaaataggttgaggttccatcaaaggtaaaaaatacacaggctggccaaatagctgatgcattcttcaatatatcccactgtcctaacagagccacaaaaaaggcagacagggagccccagaacattcttgtgagctccagtattagcttttctggaaacacatcaagtcaatgacagaaccagttagagacaataatttccctttatttaatctccacatttatgtcccctggatctttttatatttagttagaagaagggaggtggggattaggtcttaaaacatacggggggcagtttaaaagcccactaccattacttgccttggcagaggtaggggcctgatccctcatcaggatatggactgtgagatactcagggaggacaagagactggcagatgctgatagctcacaaagagaacttgagattacggagtctcaacaaatccctgcgactcattaggcatttcagacataatctctgcaagctgaaaactaggacttcaaaatcccttaagcaagggactcagacccaagagacaaggcaggtgagtgaaacaaaagaccagagataccacacagtacaaaatagtaattatttatattttcaaaaaaaaaaaaattaacatttggaagttctcccctggaggaagaggggctagtcagaaggaacagaactggctcctatgcaggcggcaagtcaggtacaaacagctgagcaatctgggctgggattttatcacacagcatttttaattgataaaatttccttctctcttcttttgttctgtttttgttttgtgtgtttttttttttgtttgttttttagaaaaaggggtgggggagaagaaataaaatcagagaaaaatgcccaaaaacattttccacaatatctaaaaacagagaaccatagttcttgtcaagacaatatgaattctggatgagttattttttccagttttcaacaccaataaagatttttgcaaaagccaccacatcagaacactcatcttccagatcaaataaccttccccttttgccttcacttgtcatttttcataaaaggataaaaggatgtattctgttcttgcaaacaataagtgctaacaacaagagagctcttctgatgcttgtatggtggtaaggagttttcacaaatatccaagttttagcacagttagaaggactaaaatttgtttctctcaatataaatactactggaatccacaaactgatttttgagaaattctgcaaaaatcttttcttctttccttttcccttctgttaaaactcaatgtcctttcttttttttttttcctttttgctccaggcacctgacgatttgttctgctcagtcagatgcagacaggtgtctccgaagtaccaccgctgggatatcctcgggccagcgcctaaactgaatccccacagtatcaaactcagccaggccaaagggaacacagtgacgcagcaacagggttttcatttcattttccctccccccgtttcccccaagttatttagtgctgttttaaaagtctggggccacaatgcagtctcttcccctcacaacagagtaaaagctccacagattgcgctgtctacctggtggtcagtggcagcaacagtggctgctgcttctggaaattaaacggagtcttacaacaagcaggatcttaggattgcttcaggcgtttgcgtgggggtcccagaaaagggcactgtgctgaagccagagagcggtatgcctcagccaccaagtggggatgtgacaccaccattgacttccacccagaggtctccaagacatccgaagcatgactaggagaaatgtggagaaatgggttaccaaagggagtgagcaagggatgaattcaacagccacctagatagcctaattttccactgttaggtataaagggtgtcaatgcaagaaacagaagaacccttaatatgcataagaatttgcttgttagacaatgagcagactggtgacttgcctgtggctgtcgtcatctgaaaaccaagactttgagccactatattctcaaaaacaaaaagcagaatgttccccaggcccccaacactgcctatgttccttatattcaccggtgatgctagtcataaaaaggagcatgggctccctcggccagaagccctgagcttctgcctggctttgccactcaccagcctttaaccacagggcagatcagagcctggggcctacttgattatcaaaaaagaggggaggataaccatacttcattcaatggttaatatctcaaaagcaccaagcaagtgtccagcacacagtaagcactcaaaggaactcacactgatgggtctctcccctccctcttctgcctcacttgatcactccttagaaaataattctacaactagacctagaggatgttatttcctgtctttgggaattttctatgttgaatattgttcactcatccacctggaatgtctcagacctgtcctgccccagaactgctgttgtgagggcttttcttctttgggttttttccagcttttgctctctccatggggcaagggagtagaacatgtcccactgagaagatgggttgtagttacaactcatctttcatattattattcttattatttcatattattattattccatattattatttcagaaagtagtatttccaggtcatttgtcacttaagatgaaggaacagacctagtggaatgaacatttctttctcaaaacagtgaaaccagctactgatgatcccttcttttttccttattctacaaccaaacatgaggtacattttactaactcataaacatatgtctatcctcctagaaatctacatgtcttttattaagtcactcagtgtgaagtaaagatactatcatttggggcatacagctttttcaggccagcaagttattttcatcacttcgattcactatgaggaagtaaaacactttactcaccaataggattcaacccatgaagtcaattccatacggtcaactgaaggaaaagatgaaaactctattcttactgccaaaaggttaatgaagctacttgcctgctttacccactaattcaaagcctttctcatttcttcagctatccaactattttgaaagaagaactttgaagatgccaactcactagttgatgaaatccactgcctgagttttcaactgatctgcactgtggaggtcggccaggatgagaatttctgcagcgttctccacggacaggttactgcagagggcatcctcacacatgacctttaagcgctccagggcatactgtaaaacacaagcactgctgtcatcagagcagcaatagttctgggctgaccactactgaagctgttttctttagctgtaccatcatattaactagatacttgaatagaactgcacagaccatgaaaagctactactgcaatgataaaacataaccatttctgaaggttagatgtttaagcttgaaatgtaaacagctaaagtaacttggaaagctgccattagagttctaaagtctacctattagaaaaatggcaattacagggtagatctgcatcctgaagtttactctcctcctgactgtgatgaaagttgttcttaaaccttcaccacttacaattacagtgaggcatcagtctgcttcacgtcaacagggcaactcaatggtctgcccttctaggccctgcggtctgtggaaacatgatctgtggggaagggtgaaagaattggtgtctaccctgtgaaatcccttatttactgcaatccccttagagccagaagagggtgaagcacagtccttttgacttaagcactgtcactagcccagcaagatatcccaactggcccatcaggttgtgaaaaggagccctgtggtgacttttaccaacacctctgccactagttgtttctgaatgagggtcaactaaaggcctccttttaaatagagaaggataaatagagtcttattttactggggttgaggttaagcttctcagggtaaaaggacaaagtggcagagagcctaaatgcagtttcagtttaaaaacttcagtttaaaaacttgtattttctaagaaaagggcataaatgttcttgaaatggaaagcctaggttaatgctgggcacatctgatctacttgattggttcagatacagctctaccacttgttctctaatatgagattatgaacttactaggaacttgagggataggaaagaggaaggaaatacaaggaggcacaaaataaaatgtcattgatcagttcacaggaaaacagtttgctttgaggctatgcacagtctccttataggccccagcttgaaggccccagaactcaatgacacaatgccccttcagggtgaatcatggcaatcaaatcaggacaatttaattgttatgaattctgggtgaggaggcatatctgctggcactgtgatctcctgcagcaaaaaagagaggttttattggttttggtgcagctttaattttttacatttgagtaactggaaaacagtttccatggaaaacaggaataacattagataagcaagaaatgaagttgccgtttttgttttaaaaggctgaaatgttcagttttttatacagtgctgcccagacgattcctcttatcctttctcaatacattcttttaaaaggacttttactgtgaatagctctgatccctattgcataattagacaaaagtagccattcttgtcccttggggacaaagttttttcttaattatgcttctgaaaaacctgcctaatggcagtacttacccaagagatggaaattgtgtctcccaggcctagcccaacgagttttgttgtttttggtctaattacacatgtccccaggagactggaaaagcttaagagaagctgtttcagcctcttgggtaaattctagatgtttagatcattccatgaaagatttcttattctgttttcctaaaactcacgaagaggtgtaaaggtaaaaacgttttcaaataggcttgaagcaaaaactgtctagttggaaattctgaatggaatttgaaaatacacccttcaattacttctcattcataaatttaaagcactgccgtgattcaacagctttatcttttaaaaccacaagttaacacattgtgctgaaatgctatccttgaaatggcagttcaggctgatcaccatgccctgtgtacttacagtaggttaccagtaggttttctggctagggagcaagaatgaaaactaagggacatggcagaagtttaatcttggctctgcggatatacaactctgagccttagtatttctgtctaaaaagtgggccttgcaatacttatccttatggaatctagaagatgagaggataaacacatgatgtgtataagtacaagtgaccacttccttaaaaatcagagcacagatcaggcagaatcataattaactttataaaaggcagttattggattgtgtcttctactttcccagagcttgcagtgaatattttcttactgtctccattaaaagcaagtttcccctggtcagaattgaggtagactggaagggtatggaattttcacattgcttcattgtactcataaagtcttgaaaagtgacaagaaagatacggttattattccaatcttcttcatcaggagcactgatggcatttacctgccccatcctccacatacactccaaaagctgatcaataaagataaaacctccactataaacacaggcactttcctctgtcctcaggcacaaagggaggtaggagactatcccatgagcaaaccctggaaggctcttgtgtccttagaccagagcccacttttccctccaatgggtattgcagcatcacagcaggaaaaggaggtgcttttggcagataaccctctttctcacagggtctactgctggcaggatctacgcccttctcccatcctcacgccaactctacttgtccgccaacacaggaaaagctcccacagggtaaacaccaattctttcacccttccccacaggtcatgtttccacagaccgcagggcctagaagggcagaccattgagttctctctctgatgtacctaaacaatgaaagtccgtttcccaatgtgcgttttggggaccactaatcttgcaggtgatccttgagaaaaaggattccagggttaactaaattggagaaatgctgtctatcataattcctgttagaaaattcacagtaacattaatatgctacatgttctgagaaatcctgcagtaagatagcaactatttgtcttggttaaactcagtatttttcataagactttcccaccaacctaatatctgttgatatttcaccttattttgggaatcactgaccgaattattttaggtaatcatcatatgtctttgattctaagatctgcatttttatttccacacttgaacacttctcaaattgaaatgtgtcatgaagtacaatttattctactattaagctattaattctctcataattttgaagaaatactgtttatttcaataactactaaggtaaaagttgaaaatgctaaccaggacactaggtaaaagattacggccatgcctcactatccttgggggactgggtccagggccccgcaaataccaaaatctgtgaatgctcaagtcacttatataaattgacagtattggccagccatggtggctcacacccataatttcagcactttgggaggctgaggtgggcggaccacttgaggtcaggagttcgagagcagcctggccaacatggtgaaaccctgtctctactacatatacaacaattagctgggtgtggtggtgcatgcctgtaatctcagctactcgggaggctgaggcaggagaactgcttgaacctgggaggcggaggttgcagtgagccgagattgtgccactgcactccagcctgggcaacagaatgagactctgtctcaaaaagtaaataaatagaccaggtgcagtggctcacacctgtaatcccagcactttgggaggcagaggtgggcggatcacttgaggtcaggagtttgagaccagcctgaccaacatggcgaaaccccatctctacttaaaatacaaaaattagccagggatggtggcgggcgcctgtaatcccagctattcaggaggctgaggcaggagaatcacttgaacctgggaggtggaggttgcagtgagccgagatcgtgccattgcactccagcctgggtgacaaaagcaagactcccttctcaaaaaaaaaaaaataaacaaacaaataaataggcagtatttccctgtatctttatgtatatcctcctgtatactttaaattagccctatattatctatactaattaatacaatataaatgctatgtaaatagttgttatactattttggttttttatttgtatttttttaatttatttttttgaaacaaggtctcgttctgtcacccaggctggaatgcaatggtgcaatcatggctcactgtggcctcaacctcctgggctcaagtgatcctcccacctcagcttctcaagtagctgggactatgggcgtgcaccatcacacttggctaaatttttttatttttatttttgtagggatggagtctatgttgcccaggctggccttgaactcctgggctcaagcgatccttcctccttggcctccccaagtgctgggattataggctggaggcactgcacacccagcaccactgtgcccagcctgttttttcttgtttcttttttcttttttttttttttttttttggagacagagtcttgctctgttgcccaggctggagtggcacgatctcagctcactgcaaactctgcctcctgggttcaagcgatcctcttgcctcagcctcctgagtagctgggactacaagtgtgcaccatcatgcctagctaattcttgtattttttagtagagatggggtttcgccacgttgcccaggctggtctcaaactcctgagctcaggtgatccacctgcctcggcctccgataagtgctgggattacaggcatgagccactgtgcctggcctcttgtttcttttttctcaaatatttgtgatctgagattggttgagtccacatggatacaaagggctgttttactgataaagtttaaatacattaataaactcaaaaacattttgtaaattataaagcacaatccaaatgttagtattatttgaatctttactatcactgtggttaaatttgagatggaaaaaagaggagaggtagaagtcaaacttatccttctttcccatagttaggtgatcatatagtttactattcaaaacaggacacttttgagaataaaaagtgtgctattaataattgtgttggaataatatgtgtaaaccaggaccgtcttggccaaaccaagatatatgctcattttacccacaatgcaacatagaatcctgttcatgaaacacaagaagtcacaataactcctagtcctgattatttttctattcttatcttaccttgtcagcagctgccagcaaatcatcagccattttgtcgaggtttggagccttccccgtgtaaatgaagcacatcatttccttaaaaacttcaggctccacatcattgatttcaactcgattctatgccagaaaaactgaatatgagaaacattccaacagaacaaaatccctaaactaaactattttcatgattttaagctctagtgaggagagaactttgtatcatttaaaacctaacattaatggaaaatttctttgcccggcttgattataatagccttttcgtccatcacatgttccatctttgttttcttaaacataacagcaaaacaactcttcgattttttcacctttcttttcctcagttttctgagtaaaaacatatatgtctaaataccctcacccaaaactgtgtggatgatcagcctcatttaataagtcaatctgctttacccataatacttctacaccacttctctctgctctcagaaggagtttagggactcatactccattttagtaagaaaaaagtaattaggaaaatgaatctgcagctaaagtgggaaatcatctgactctagatacctggctaaacagacatgtcttcatcttgttacatacctttttgctctcctccatttcatgttcaaacatggcactaaaaaccggagaacgagctacaaagtcaaagagaaacaagcagataaggctatcacagtgaaatctcttggttgttgccagtcatgagggagagatcattttctaacctatcctactgctataggaaaggtctctacctcaatttacatcagaattacaaaattcctttcttcatatattataacaataagtaactaattataatacataaaggaaaataagaaaccactacttccaaaataacttatcggctctactccaaccattcacatttcaagaaaattacttatctatgttggatgataatgctatgttctctgtatagatttggggttcaaatggaaggtcccttatgatcaagcagggtgttctaatacctatgtttttgttggaactgacaccatactttctgcacctccagggactgcacaggaagaaggtcaagaactgggctcaatggcatccactaaccagatgaagcgcatgctcacctatggcaaactgtctgtttttctaagctatgcattcctaacagagatgatattgccccaaagaggtggggggggaaagaaactttagatattataatgatttgtgtccctttaaagcacaaccctacctgataaaatcttcttccttagtattttatttctctcatcagggagaatttaaatttagtttttctccttagaggcagggataatgaaggttggaaggttgagaaacagtgctccaactcatgctcattctagtccaatgaacaccatgaaaaataataatctcaaccacgaaaagtaatagaatggctaagaactcaaatttgttcatgttgtcaaataaatcaggggttctggtgaaagctgagatccaacgattacctaagagtgaaagaatggacaaaatatatagtagaaaggttttgagctaacagagaactggaaattttggcctatagtttatgtcagaaagcactaattttagctctgccatttttttttttttctttctgagacaaaagtcttgctctgttgcctaggctagagtggagtgcagtggcatgatcttggctcattgcaacgtctgcctcctgagttcaagcaattctcctgcctcagcctcccaagtagctggaattacaggtacccaccaccacgcctggctaatttttgtatttttagtagagatggggttttaccatgttggccaggctggtgtcgaactcctgacctcaagtcatctgcacacctatgcctcccaaagtgctgggattataggcatgagccactgcacccggcctagctctgccattttctaaccacatattcttgggcaaatcacttaaccctctgaacttcagtattttaatttctaccgaaaggatatcaattctcattgttcttatttcagaagggttacagaccatagagaactaaataaatatatttcagaaattaaagactaaaggcccggtgcttttcataaagaaggaagggtccaaagcagccaggtcttgagggtcctcggtaaataggcagcagctgatgcaacgggaataaatgaaatcactcagggagaagaagtggaatgaaaacggaactgaagcagatcctcagggctcaccaatgtataaagggattggtgaggaagaagtaaggagaccacacatcagaagcaaccagagaatcaggagagaggagtcctagtatatgaactaaagtccttcaaatttaggaaccagtagatcatgtaattttgaaaaactgctttcatagcatggaggtgaactgaggataagtgggaggaaaggaagtagaaagtgaatatgctaactcaagaaactcagttctggggaaaagagagagagaataactagagggagaagcttggagcctgtacaggctgaaggtgaagaggcaataacagagagatagtgaagatactagatagatagcaagggtataaccggtagagtaaggtttctgagaaggcaagatgggatataaaacagagcagaggtagaaaaaaagtctgctttgtccacgaggaagaacacctccactgagaatgcaggtgaggtaagaagcaagagttgaggaagttcctacaaaagggcctccttttctcttggaggaagtaggcaaggtaatcttttaggagtttggaaggagttaaagagtggttaaggtttgagacagctatcgttaagaaagggagttgcctaaacatctgtagaaaaactattggcagtgttgagggcctagctaagtgtggagacactaaccaaagagttatagacttccttgagttttgtttttttttcccccgagacagagtcttgctctgttgcccaggctggagtgcagtggcatgatctcggctcactgcaacctccgcctccagggttcaagcgattctcctgtctcagcctctggagcagctggtattacaggcgcatgccacgatgcccagctaatttttgtatttttagtagacatggggtttcaccatgttgaccaggctggtctcgaactcctgacttcaggtgatccacccgcctcagcctcccaaagtgctgggatgacaggcatgagccaccgcgcccgtgacttccttgagtattacacagtaacagccagttgtgagagggaacaggaaaatgtttagactgaggcagtctgaggttttaccaggtgtgtactttagaatgacggagcggagggtcttagtaagaagtgtgttacttgaaggttcacacaatttcctgttaggtcttatggtcttaagagaagtatacggtgattgttacccttccctgggcggtgaagtcagtccttcctcatcagttcctccttggtgtcaatctccctggtcttgaaaaccatgggcctattaaagcaagacctgatcctccatgtcaggggcaagagtttcattcttctagtatgtttaaattgaaaagagggctaacccctccagggctgaggactagctagatggcatttagtcctgagtatagaatcctctccattacatcctaaacccttatctaggggttgatacctgctcttaactggtgctctgacatctactctctaggggcaaaggcattcaatacctttgtacatcatcatccatgccttgaaaatgatggcctaggtccactacagagaggaaaaacagaaatgtcattttagagagcagcttttttggttctgagcattgttaccggaatacaaagatatatttagctgcagtttgttttgtagttgagttcaaaaagttgaagttgttcaaaaggtgattatgcaatcacttgtttttccttatttcaccaaaactataaaattcctcatgaataaataccaacctgctaagatagccttgtgagcctggaattcctggccggcaacacacaagcagcagtctgtgaaccgggaattctcccacagtcctcctaactcatctgccagccggcactcaggaacctttaccatgttcatggtattctggccagaaatgttgacagaatcttgcacaacactcacctgtgaaagacaaggaaacacaagccaagcttttgttaccaggaatttttttgccagcagatagacgacttttacctaactgctgtagtacattcagatactaatattaatcatattatcttgaaaccacctccacaaatcaaggctttagccccggatcaagtaactccttttctgtcacaatcagacttattctataccatctcaggacaataggaagagagccccacaaatctctttttcccccagtttctaataagcttcacctcccttggactacaaacctgggcaaaggtgccagagagacaaaactaacagaaacaaatgttaaacctcaagtatttaccttattctgccttaagttcaatacaaagaactcctataaatactaccatttaaattaaactctagagacaagaatctgatcacttttttttttttttgagacagagtctcactatgtcacccaggatggagtccagtagcatgatcatggctcactgcagcgttgacctcccaggctcaagtgatccttctactctagcctctggagtagctgggactacaggcgcatgccactacatctgactaattttttatttgtttacagagacaaggtctcactatgttgcccaggatgatgttgaactcctgggctcaaagtgatcctccatccttggcctcccaaagtgctaagattataggcatgagccactgcacctcgccaaatctaataactgaagcctaaaagacgttattttagttaggtcgagaacatgcacataaaacgcatcttctacagagcctggtaaataactggcacttcttcaaaaatattagtttaatgaacatgacattattgacccactgtcagtaaggaccagacttggaagatctttctagtagtgaaaactgggtgagtatcccacacttttatacctttagtcagttgtgataatgacatacaagatgcttggctgtagctacacatgcacttatagctttggaagataatgatgacaataggtttataaaggaatcccaacttcccactatggcttcagcagaagcatgttttaaccagttcagcctaggtaaaaaaccaagttaacttctaggtgagtcagtgaaactcagataaatctgttagggtaccaaatacaaggatttataaatcatacaacatcataaaataaatgtcagttgcccaactgtagataggacactgcagatcagtcatctgcctaacaattgttgttatgcttcatctcctacatcacattctgttagaaaagttaaattcaaagcagaactcacaaaccttgagaattagctccccactcttgctgttcctaacagtaagatgagaaagacagcttaggaacatccttaatgacccagatttcttttaaccttcaagatgcaagtcatcccttaaacgcagtcataagcccagaggcaaagttaatgacctgtagttccttctgtgcaggagtgagatatttactatcaggtcaagaaatttattcatttgtttaaaactagctgttatggtcttgggcaatgaaacagccaagttaatcaattatgaatatacttggcattagtatcacatttatcagagccagattataacattattttaatagcctaggacacagtacaaaccatcccatagagattctctcttgtcctttataagacctctaatttgcttctgccactttctcatattaataccctcacttctttgacataacattaacactgaaagtagaagttgcctgttctcagttatagctctaaaatactaatttaaaaaaaaaaaaaaaaaaggaaaagaccaattaaatccaactttctcacagggaaaggcaggaatctcctgggatggccaatgaagggaatggagaatgcttttggcactgggttcctagcttgaattaaaccaggttgacaggagcccaaagtcattaacacttgatggcaatttagtagactgggtgaaatgaattggcaagaagagctaaactgaatttcacataatcaaaccatagttaccagtgggccttctgctggttagatgcacatgtggtaatgagtggggcccaaaggctgtgacatctctcactggggcaattcctctctctggacacagacaggaacacagcagaaaagagaatgtacctttattgtctgagccaggcttgttctgtagatatatagatgcctggagtctccagagctctgaatgtctggcacctctcaccaacattaaatacgcttaattaaaaataaattctaaatggcattcacaaatgagtcttcagagcccaaacttttaacttagaaagggattgttttcctctgcaaatgatgatgctaaaatgagaccattctgagaaaaactaaagattttttttaatgcctataaagttgactggggagactcattcagaactgcagctgtgaagatgacgtgactgtgacatttatgtcatcttataaatgactgcatgaaaatgtctcaggaaggctgtataatctccttaacttcaagttgtaaaagggtctcacttttaaagtcaatccttttcttaaaaaaacaaatttcataaaaaactaaagattgtgccaattcttgtacatttcatctatacataaagtaaaacccagggaaatacattttttaacttctatataattaaaacaatctaggaaaaacagacactgcctacaaattatttacaacaggagcactatttctactagcaaaagattagcaacaacctaaatgtccatcaacaaaagaatgaataaattatacattcacacaagactattatatacagcactaaatatggatgaagtatagttatataaattttagaaacataatgtgaaaaagcaaatcttagatgactacatacagtctgacaccatttttataaagctccaaaacaagtaacctaaacaatatattattcagacatacaaataataaacaagtgcatgataacataaaattcaaaatagctatttatcatcctctgagtggggaaacaaatcttagggattggggagaagcattacaggttagttccaagttattggtcatatttttaggttgagtggtgggtttagtatattctcatgctttataacctacaatgatgttacctattgaatcaccatttgtgtaggtcaagaacaagcaaatattggtattttcatccagtacaaataatatattcaaataatccaataattaaaggataaaaaggtaaaaatgaatagattcatttatttaaaatttagcaaaaatacctattcccatgctatgaagtgtgtgtgtgtgtgtgtgtgtgtgtgtgtgtgtgtgtgtgtataaaactattagtttaaaaaatttagagacagggtctccctctgttgcccaggctggagtgcagtggtagcggtgtgatcacagctcactgtagcctccaactcctgggcttaagcaatcctcctgcttcaccctcccaagtagctaggactacaggcacgtgccatcatacctggctaatttttaatttttttgtagagacagggtctcactatgttgcccaggctggtctcgaacttctgggcttgaatgatcctcctaccttggcctccgaaagtgctgggattacaggttatagtgagctatgattaagcaactgcactccagcctgggcaagatcaagatcccatctcttaaaaaattaaaataaagttaattagtgtctggatatttcacatttatgttatttcatatttcatctttagttacaacatgacaaagaggttctgggattatctacctgtcaaaggcatatatggtaaagttggaatacaatgcttctttattgctaatggctatttgttttcaatataaataattggagaaaagggtcaatagaagctgaactatttcatgaagattttctgtggaccaaattattaaagagaaaatttaaaatggaatttaaacatgccttcatgtctctatttatttatttatttatttattttttaacagacagggactaattatgttgtccaggtaggagtgcaatggctactcacaagcacgatcatagcacaccacaacctcgatctcctgggctcaagtgatcctcttgcatcagcctcaggagtagctgggaaccacaggggtgggccaccactcctgactcttatgtctctctctttcattaccaaagtaaatgctctgtcaagaaaacttgggacccgagtttgtgcttccttgggtgaatggcattcagctccacttagtgtagtgcagcggactagagatagaaaatagggagctgacatgaccctcgcactagtttgctgcacaatgttaggaaaaatttcctgactccctgggcactgcttctctccccttgtaacatgaaatgaagaaaacagaactaaacctagctcaaaggattgtaataagggacaattcaggaaatgctttggaaatgcttccaaataagttaactaagcaataacaacttggaagaactgccacatttcctaataggtaaaacatcactgagaactgaaagtgatctcagtgtctacagtcatatcaccctgaacacgcctgattttgtctgaaagtgaactcaatgtagggcacattataaacaagaccacccattcatcattttcagagtccacaatctaatttcatttaaacattcaacaacaggaataccactgaaataaaggccaaacataaaagggtgcttctcggtcttccaccataggagtccctcttgtggcctctgggagcaccagaatccctatgaaacaactgtatttattgtatcaggatgagaatgagaagtgcctcagtcaaaggctgagtgacgaatggggcactggggtactagaacctagatttctatctggacatcaacttcataaaagcctctaaacaatatgaaaatactaatcaaaccaataacaaacaaaatgtaaatatgaattaaaacaaatgtgtttataaatattccactgatagaagggaaacaacaggtcaaagggataaaatgtgcaccaaaaatgatctagctatgaaaagtgctaagaacttagatgagctgcagacatccttaaaacccacacatccaatacacacccccacgcaaccgtcttgcaacgctgaatgctactaagtccacagagagccttggaacagaaacaagtctcactaggcataagcccaagtatgagaagcaacactcagcacctgtggccaacagagaagtgtgagaggaacagatggcacacctggttcgatggtaagaaaccgatggcatcagcagaacccagcagacgttaccctgttcaacatctcctcgtttctaaagtgtcatctcacttcccatctaagtcaaggcacatctaaacttaaccacaggatttctcctaagagaatttcatatggggaagtgaagggagagagcgagcgagctggaacttggcctcggatttaaccacaggataagagactgccaagtgagggcaggccaactggcttccaaatcaagactgtgaagacaggggttggagcagctggaatggattgggaagagagggggaagcatatgagaaaaggctggacccactgtggactcaaaaaagctgcagtaaaggttatggtattgcctaacactgccagatgcagtatttaggggagattttcttcagagaacagtttaaagattggctttcatttccaatagaaactagaattttctactatttttaagtttttctgaaatgcaagtctgtaagataggtgaagattcaaactgtgatctgtttacataacatctaacctcatgtaaaaccaactaaattctcatttcttcattcaggcaactgagtataatctgtgacgttagatttacacagaattcacactccaagtttatcagacataaaagaactgccacattttatgtatttattatagatgctatcactctagtatttccttcttttacttggtaattaaaaaggagaggggataccaaattatgcaaactatattttacatatttagtgtggtattataagaaactgcctccaaagttttctaatcatttgcaactactctgttgcaatacagaaggctggctgggcgtggtggctcacatctgtaatcccaacactttggcaggctgaggcaggcggatcacttgaggtcaggagttcgagaccagcctggccaacatggtaaaaccccatccctactaaaaatacaagaattagccaggcctggtggcatacacctataatcccagctacttgggaggctaaggcaggagaatcacttgaatctgggaggcagaggttgcagtgagccaaggttgcgccactgcactctagcctgggtgacagagcaagactccgtctcaaaaaaaaaaaaaaaaaaaagaaagaaagcaatacataagcctgctaccgaccgctaggccttttctgcaaaagggcaagattcctaagggactccattccctgctactcaggtggtgatatgcctttgaaactgtcattaactcacagtgtgagcctattatttgaccgagcgagttggcaattggggaacaactgtaccatcccccatgatgatacactgtttattattatcaagcggtgctgctcaggaagtggttcctcaacctatgtgcagggaacactaatgccccagttgactggagattttattcatttattacactgtgagcttgtcagtatttctaaatgtattcataacagcatgaaatgactaatcagtatatactcattaaagaaaccactttccaactcattcttggtttgggaattttatttcaaggcttctcctgtaaacctgggaaaagctcttaggtcactggtgagaggactttcctaactgactacagataactctgtgagctaactgtgagttagagagctttacatagccttcaccctagaaaaaaaatggttctcaccttcttatttcacaattactccagcaagacaaaccataggcctcaactcttgataagaatctagttcaaagagcagaaaaggtaagtaatctgcaaacacacatggccctcacacttaaggagccagaaagtataaacaacagatacacatatttagcttgatgtgacagtcctttcaaatgctatctgaaaaaaatcccacagtgaaaactcctgacccaagcaacttaaaactgacacataccaaggtagcatacatacaacctttgtttttaagaacagtaacaagtggaaagctgagatgcccaacaaccttgaaatcatcaggtagctcaatcagtcacataaataacatttgtgcagcactactccacttggggctttttcttactctacatccctgatacaatataattaagtctaccaatactcatcagatctgggaactgctagtctcagcagaatacaaggactcacctcgcagaagagggtaagcttgtcatcagggagaagcccgttggcctcatccaaaagaaaatctctacggatgaatttcttgaatccccagtctttgccttgcacaaacctatatgcccgttgactctctggggtggggaaaaaaaaagtcatatttaaggttacgcaaaaaccagatcaaagccacaacttgtcagtgtatgaaacttctggatgtgaaacttaagagttgaacaaagaggagaacatttacccatagctttggtttcttctcccttggcattcaggatggagaatttgaattttgcccgaacttcactctttggacagctgaccagtaacaggtaaagtgacaggtaatctttgctttcttcatctaaccctttggggtttactcgcaaacacctgtccaaaacagatagaaaaaaaaaatgtcaaaagcatccattttgatagaactggaaatcagactcaagagagggagatgtttaaaaaacaaatgcaggccccatagaagaatataattcagtagaatgactagttgggaacaacttttttctctttttttttgagacatggtcttactctatcgtccaggctggagtgcagtggtatgatcatggcttactgcaacctcgatctccctgggctcaggtgatcctcccaccccagcctcccgagtagcggggactacagatgtgcaccaccatggccagctaatttttgtagagatggggtttcgccatattgcccaggctggtcttgaatgcttgagctcaagcgatccgtctgcctcagcctcccagagtgctgggattacaggaataagcaaccacacctggctgggaaccactttcgtaaagcaaaatgggtcaccttttaaaaagtaaacaacaggctgggtgcggtggctcacccctgtaatctcagcactttgggaggccaaagcgggcgcatcacttgaggtcaggacttcgaggccagcctggccaacgtggtgaaaccccgtctctactaaaaataaaaaataaagaaaaaaactagttgggcgtggtggcaggcgcctgtaatcccagctactcaggaggctgaggcaggagaatcgcttgaacctgggaggcagaggttgcagtgagctgagatcacaccactacgctccagcctgggtaacaagaacgaaactccatctcaaaaaagaaaaagaaaaaaaaaagaaatgtgtggaccaggcacggtggcttatgcctgtaatcccagcactttgggaggccaaggcaggcagatcacttaagttcgagaatggcctgaccaacatggtgtaatcctgtctctactaaaaataccaggcgtgctagtgggcacctgtaatccctgcttctctggaggctgaggcaggagaatcactttaacccaggaggcagaggttgcagtgagccgagatcgtgccactgcactccagcctgggcgatagagtgagactctgtctcaaaaaaaaaaaaaaaaaaagtgtgaataatcttttatagataataatatacataatcttttatagatattttaccaatctggcaacaatattctaagactaaaataaaagaggcaatatgaaggaagcacagacaaaagtaaattatcattacgcagcacagaattccaggccagacttctaaatagtgttagagatgccaatctgttacggagagatcaaaacaaaattcagacagaataggttcaactaagttgtaaatgtcattagtcaaatgcatgggtttcaggcactgcttctaccacatgcaatacacaggtcatatgtatccttaagccttatctgtattattgcacctctctcaaacaggtggcccaatccagtgtctctctagggagtgcatatgctacatacattactatacaccttgctaatgatgaggatttaaatacaatgtctaagaataaacatctctctcaacacttagtagtaaaatgcacaatatatagccaaaaaatactaaatgaatgaaaaaataacttttggtgggttatcagaggtcaaaactggtggttcagagacttgcgttttggtctttgcagtgggtatatggttgtatcctcaactgcctgctcctcaggcaagatgacacatagtctgaatgagactgatcctcactcctggatcatattttccctgctccagggattggttcagggaatgcaaacgtaaaacaattggtgcatgtacgacatattcctggccacacagttcagagaaagctcaaagacttttgctagcatgtagtagattatacccattggtactgccagttatcccttaagcacaagagaagccagacctgagatgtccaagagcgtggagaacagggccagggcagagatggtgttcttactctaactactggcttgctggatcaagctaccttcaaacccatcctataccctgtcaatacagttacataagcaaataaatcccctttcttgtttaaaagcaggcaatttaaaagtaaagagatttttatgttaaaatctagatttcttgcttttcttgaaaaatcagaaaatctggcaagggtcagcccttactcatgcatagctatagttagctggagctgagtagccagcacctcttttagaagaacactcactagtttgccaagcagtcaccagtcattccatttatggatatcatttataacactggctttctttatttatttacattaccctatagcttgagtttgctgatttctgatatactcattgaattagttcaacaaacatttagtgagtacctattatgtgccaggcactgtgctaggcactgggaaatacagtaagaacaaaacaaaagtcctggccttcatggaaattacattcttgtcagtgtcccataaaaccaaacaaaacagacaacttcagaaaaatttttacagttagacgtattcttcctcaccatttcagtttatcatttgctcctgatgaaaatgtagaacttttaatgacttcacccatttcctcccggcaaaagctaaagttattgatggtccacatgtaggagaatttcactaccttgatctgttgatagaaaaacaggaagcaattaaataggaagtggacaacctgaaaaaacaggatgaagggcagattatcatttcccctccctccctctgcatgatcctgataggaagatagcagttttcaggtttttctcaccttatgttcctcatccacattttaagaaatctcacactgaccaatagcttttataacttttttcagctgctgagaacactggatggaaagtgagagaaacatacaggaaaaacagaaacaaaaaacccaccaccaccatggacagggctgggaaagcatatgataaaaccgtacttaaaatgggtctctgttattaaaatgttgatgtcactgcctggggttgcacatctcaaacttgtttccccaacagaggaaactcagaacacactttcatcaagggcaatgtaagcagatctagtttcaaagattccccctttcaacctccactgaaaaacactagcctagggaatttagattccacatggaaaactaaggaacctgaggctaacaagtatcttatctatctgctctttggcagttatgttccagagaaagcaagaagcccaatgtagaaaagcaatcctactcctttcgtccaccaaatcctccccagatgcaagattcacaggctgaaaacttcaacttacctgtgtgtagcaccaactctcagctacggggccactcgacatttctgccggaggtggaggacttggaacccttgacatcgccagtttgaaggttaaacgagatttccaaagtcagggggcaaagatttctgttccctcttcaccctggtcagatccaagaagcaagaaaactttattagattattaagatacgatcctaactattgtttgacctgatagaggctggaaattttgtctccacattgtttgagtggctccttaccactgaggtcctaaaattttttttttttttcctgatagtttcgctcttgttgcccagacgggagtgcagtggtgcgatcttggctcaccgcaacctccgcctttcctgggttcaagtgattctcctgcctaagcctcccgagtagctgggattacaggcatgccccaccacacctgactaattgtgtatttttagcagagacggggtttctccatgttagtcaggctggtcttgaactctcgacctcaggtgatccaccctcctcggcctcccaaagtgctgagattacaggcgtgagccaccgcacccagccgaggtcctaaatttaaatgttaacatcagagaagactatctaatgtaaagtagtcacctagtcacaattatatcaccctatacctctgcacaatactcaataactctattgctgaatgaatttattcaaagggtatttaaagtatatctatgaaaaggctgcctgaagaggagacagcatcattaacatcagacataacttgccatgggctccttcctttggggtaaaaatactctactcctaaagcaaaatgaccttgttaccctctctaagtttgcttcatcttctcctatgcttcactgcaaacttaaggaatcttctattcctcaacccattgctggctgctctcttgaaggggaatatttttacacctttcttagatgtattcctttctctgcagcattcgtgatctctccctgcttacattcctgtcatcactcgatatttcagattcttctccttgctctgttttgtgatcattcctcagtctcctttactagattatcttcgtccactgttgctccccatcatttaatcctcaatcattttctcaatctacattctctgtgtcaattttttgttttttcaccagtcagacatatctttatggcaatttcatccatcccaacaatgtcaaatttctacctttatacaagttttccaaatctctacaactctcacctctctcataagcctcagaccattctccaataactgttatatatctcaatggggtgtctcagtagcaaatcaaatccaactcaaaattcttccctccaacagcctttctaaataccaaagccattaaaaaaactggtgaacttggggatgagggagtgggactggggagatgtaggtcaaggggtacaaagttgcagatgggtaggatgaattcatctagagatctactgtacaacatgagggctatacttaataatatcgtattgtataatggaagtttgccagaagagattttaggtgcttttaccacctacgcgggaacacacacacacgcgcgcgcgcgcacacacacacacacacacacacacacacacacggtaactgtcagataatggatatgttaattggtttgattatagtaatcatttcactatgcatatgcaaatcaaaacattatgctgcatacctcaaatatatacaatttttactattttttttgagacagggtctcactttgtaacccaggctgcagcacagtggcgcaatcttggctcactacaacctctgcctcccaggctcaagcaatcctcctacctcagcctcctgagtagctaggactacaggcgtgcaccaccataccaccttgctaattttttgtatttttttgtggagacagggttttgccatgttgcccaggctggtcttgaactcctggactcaagcagtatgcccaccttggcctcccaaagtgctaggattacagggatgagccaccatgcctggccacaattttttttaattggtgaatttggttacaatttttaagcaccataaacaaagccaaaagacaaactaaaaaaaaaaaaaaaagcttgtaacacatgacaaagggacttaataaaaaattgatatataaattatttctgtgaaatcaattgggtgttatctagtacagtggaaaatacatgtaccctaaaacttagtaactccacttttaacaatacatgtgctagagctgtgattctgaagtgtagagtgcaccacaatctccttttaaacagattgctggccccacccccagagtttctgattcagagatttgggatgggcccaagtttgcatttctaacaagttcccagatgatcctttgagaactgctgtcctagagaaacgctaaacgtgggcacaagatacagacaagggttttcaatgcggcaccattaataacagtgaaaactagaaacacactgaaaatctttagtaggggaatagataactaatttgtattatttccatgtaatagaaaactatacttcagaatttaaaattaatgaactaggctggacacggtggctcacgcctgtaatcccagcactttgggaggctgaggtgggaggattacctggggttgggagttcgagaccagcctgaccaacatggagaaaccctgtccctactaaaaacacaaaattagctggctgtggtggcatgcacctgtcatcccagctactccggaggctgaggcaggagaatcgcttgaacctgggaggcggaggttgtggtgagccgagatcgcaccattgcactccagcctgggcaacaagagcgaagctccatctcaaaaaataaaataaaataaaagaactagatctacagcaccatggacatcaaacacagagctaataaaaaaaagcaagtttaggaatgacatgtacagtacattatttatgcaaatttaaggtttatatattatttacagatatacgatacagtaaaagtaaaaaacaacaacaacaacaaaaaacagccttgacagcctatatatcagtttcatactgggagagggaaggaaggagaaggagactgggaaaataatgtaagatgcttcaagtttatctcttgtgattcttttaaaataaggatacaaagaaaatatgataatacaaatatctgttaattagggatgacaggtacttgggtataaactactttttgtagtgttctgctttatttttatcgttttgatattggagcaattgtgtaaggatatattccattatatcacacatctctggtttataatatacaagggagaaatttcctgaacacctagtttgttttcaaaggccaaacaatatgaatcttataactgatcatgttgccctccttgcttggctactaagaaatcctgagacaagtttgtgactcatcttttaaaactataagcccatatgcctgctttagatgctatattttatacaggatcattctataatagttttattatagttcattctataatagttttattttcttaattattccctttgctataattctctcaacttttaatcttttatatgttaagtatttttggaatctgcctcaaatcctctgcagaaagaggtataacaagtaacaacaggctgggcatggtggcttatgcctgtaatcccagcactttgggaagccaaggcaggcgggtcacctgaggtcaggagttcgagatcagcctggccaacatggcgaaaccccatctctactaaaaatacaaaaattagccgggtgtgataatgcgtgcctgtaatcccagctacttgggaggttgagacagagagtagcttgaacccaggaggtggaggtggaggttgcagtgagccaagatgtcgccattgcactctagcctgggagacagaggaaaaaaaaaaagtaacaacaaatcacacaataactcaactcacaaatattcactgactacttaaataataaacacggagattaataaactacagttgcactttcacagagtaatactcataaatgaaatgagatgttattcccatggtcataaacactatcttacaggaatttccttttttttgagacggaatctttctctgtcgcccaggctggagtgcagtggcgatcttggctcactgcaagctccgcctcccgggttcatgccattctcctgcctcagcctcctgagttgctgggactacaggcacccgccaccatgcccagctaattttttgtgtttttagtagagacagggtttcaccatgttagccaggatggtctcgatctcctgacctcgtgatttgcccaccttggcctcccaaagtgctgggattacaggcatgagccaccacgcccggccaggaatttacaattaaagaatctgtgaaatcacaaatgaagctaacatggtgtgctgtctcacttaagctagcaacctaagcactgcagtggcatttgggcctccctggcttgtgcaattcatgattccatgataacatgaagaaaagaagccaaatgctactgtggtcacctccaagataggcttgcatttgatggaaaacacattcttaaagaactgttttatttttccattaacaagtaagtataaatgagctagttttacaaatcccaattatcattaatggccagaatgaaatttcaaaattcctactttgggacagggtggcaatgaaggtttgattttatgcattagttaagaacaaaaaatttggctctggagaggtggattataggcacagctctacactgagtaatcctaaaataccaatttgaacttattttgaggttaaaaaaacttcaaactgatctaacaatgaacaatttatgaattatctaagcccaggaaaaggccaaattttaataactggtttattttaatgccttaattgttgttactcatccttggttcattattataaccagaaaaaagaaactactactttgatcttgaccattttttcccacctttttttgcttctgacttattttgtagctacatcttttcccttcttctaatttttaaaaatctctaacctcacagccagcagaactggagaatctgtctcagactctgaggagctcttaaccaaacaacctgctggaaaggaaattgactaggacagcacaagtctaattaatttcactcatagcaggaaccatgggcaaagtgttcatcagcaaagtagcctagtgctacatgaactctctagcacttcatgccaactgctgcagatgaccagcagaaaaaaattttagaaaagaggagacctacctgagggttagagttcgagaacctctgcagcagacagctaaagccaaaatatattgctcttgccttcaaacaagttaagacagtctgtctgcattctctattgagaaatttattttccaaagcttaccaaactttctagtacgctcaaactctgaggctgaacatataccaccatttattttcctgcttactctattaaattctgacctgtgagaacagacctcttcgagttacataaaaaaatgcactttaaaatatctctgtcaactgtaatactgcttaatttccaacgaaggtagtatcagctagcaactaataaaaatctctaatggaatgcttcctagtgggtattataagaccatgaagtcattaaccagttttgatgtgattcaagccaacaatataatttctaactagaatattaaactttggaggacagacagaaggacaaaaaaaaaaaatgaattacaggttgagtatccctgctctgaaaagttccaaaatccaaaagtttttgagcactgacatgacatgctcgttggaacactttggatttcagattaggaatgttgaaacagtaagtacgtaacaaaactattccaaaaaatctggaaaaatctgaaatccaaaacactctggtcccaagcatttccgataagtggatattcaacctgtaatgctgtcgtgatgcacagataatgctttcaactgaacctacggtgcacttctttcctgccttcttttatacttatgaacacttctgctgactcctgtagacttcaagctccttaaacagaacctgcaactattctatatatcccttatcacctagcacagcctgcctggaactcaaggaattcagtacaaatactctgatgaaggccaggcgtggtggctcacacctgtaatcccagtactttgggagcccgaggtgggcggatcatgaggtcaggaattcaagaccagcctgaccaacatagcgaaaccccgtctctactaaaaacacaaaaattagccgtgcgtggtggcacgtgcctataatcccagctactcaagaggctgaggcaggagaatcgcttgaacctgggaggcagaggttgcagagagccgagttggtgccactgcactccagcctgcaacacagcaagactctatctcaaaaaaaaaaataaaaaatactctgatgactgaaacactcatccagttgcattcaagttcattaagttttctggttttttttcacatatctctaaaacagccctttgaacaatgctgagtatatcagatttgcaatgtaatgagaataattaatttgttatttcagataaattatattacaaagcccaaaactcccagcccggtacctctaatcccagtcctggtaaaactgagtttttcatccagtatcaagtatatatttattctacaagaggagaaagccttgttataatttcattttgaaaacaaaaatcagtaacttatctgaactaaactcttgcataatcagaattctttcaagatagaagacaaattccctgtacaataaaggaaaatgtcccaatagtttattttgcagtatttacagaactaggctagaacaccctctgaaaagtgttacacagacagcttgtgcagtcactttttaaatctttcacttatttcccatgagcatttctccatcatcagtctaatctacttatccagagaattaaatcaaccagttaacagagagagaggcatgaatctcatacatgatatctatgaattagccttacttatatccatcagttttaagatgacaggaacaagattgtgaagatattagattgaatcatgaaactgttgttttatatgacaaaaatagttgaatatcagcaatttcatgtggttcaacataatacacagcatgtacaagctagatggctgggaacagaccagagaatggtctgttagggactttttaaaagcctctctctctgctttcttctggtttaaagctttgtacagtttccaagtaaagaaaagccccagtgtcataactattttcaacccgagatgtttgcgttttccaaaacagaagatgccaaaaagattgacgacaattgcaaaaacaaacaaacaaaaaaactgtaagacttttgtatactaatttttgagaaactaatgtgaccaaaaggagccttttgttttttctgttacagtgtgctcaatcatacacagcccaggaggtaatcttttctttctcattaccccaagggtagttattacaggtcatactgacttctactgttgcaaggtttaaatgacttttgaatatttgttatgagtaaactttctgcagttcaatctagtccaacaaaatactaaatatacttaaaaaatttttagagacactgcttaaaatgaaactcagggcttcagacagacctcaatcagcaaaggaaagactgaggttctcttatgtcttttatcgggttcatgctttgtaaaactttacaaattaaagatgcctgtttttttgttttctttaaattttttttaaaaaaaatttgtatagacagagtcttgctatgttgcctaggctggtctcaagctcttggccccaggcaatcctcctgccttggcttctcaaagcactgggaatataggcatgaaccactgtgcccagcctgttttcattttttaaattcttacactgcacctatagggggattaccgataccaagtgaatctagagatcaagaaaaaagtccacagccttacagaaaaatgggcaaagaacaaccaacggtgtacagaaatggaaatacccaatggttcttaaatatatgaaaagatgttcaactctcattcaagataaaaatgcaaattaaatcacacattgattcacccactgaattggcaaagatcaaaatgtttgataacacttacccagggtaaagaaaacatttctggttggtgtataaattgttacaatctctgtgaagggcaatgtctatcaaagtaaaaaatgtgcatcccctttaatccagcaatttcacttctagaaatgtatccctactgatatgttttaaaggacaaatataaaaggtttttcactgtggggactatttataaaacacgtgaaaatggaaataacctaaaagttcatcaacagtggattaaataaactatgatacagataatgtaataatatgcatctcttaaaaaataaggaagctccattttttaatagaaaatatacatttgttttaacatatagaatatctcccaaaagacacaaggctctagggatgctggttactcccatgggaggaaactgggtacacctgagtgggaagaagtcccactgtattcctcttaatactttctgaattttgaaccatgtaaatatattacctattcaaatagtaaattaaaaaatttaaaaaggaattagcagcctttacaattaatttttccaagttgtgaagaggcttatacatcgagacccacatgagagacaagaaaggaattcttcagtggcctccattgctatctgagtaaaatcaaccttttcatcatgaccaccatggcctcagcatacctccctgaccttctctaacaatcttctcaatcctgatgttttagtcactcagggctttaactctaatccacaaacacattgggctctttcctcagcctagaaagctctttcttccctcaggtctttttataggtgggtccttcttgtcatttaggtctcctagcaaatgaagttatcttcagaggagtcttccctgaccacccaatctgaagccacttccacttctagcctattcctctcatcacattaccctattttattttcttctttattaccactacctgaaattatcttgtttttattttttcacttgtctattgtgttccctactagaagttaagctcaacgagaatagtatccccctgtgcctagaatggcataacaggcactcagtaaatatttgttcaatgaaattttggttgagcaattagactccttctcttttgggatcatttttccctaatgagttctagttaataaattaaagtttaggagttgttgaatgaatgtagctataggaatccaggcatacttttaaaacaataaaacattttaaaaagaaaactatcaagtcactccaactttaagaatttattgagtacattacaaaactatttatacccttccctgattaaaaatcttttcaaatccaagaaaacggaagaaaagggaaacgtacagagctatggggggagttcctgaatccacaagacaatagtgagaaaagtacatttcccagaataagtcaatcctggttatagaagtaccattacagcagctgtcaggaacccaagctaaactcttaagttatttcaagttaaattcttctttttttttttttccagacagagtttcattcttgttgcccaggctggagtgcaatggcatggtctcggctcactgcaacctccacctcccgggttcaagcaattctcccgccttagcctcccaagtagctgggattacaggcgcccaccaacatgcccaggtaatttttgtatttttagtagagacggggtttcactgtgttggtcaggctggtctcgaactcctcacccaccttggcctcccaaattacaggcgtgagccactacgccttgcctcaagttaaatactatatattataataaaattccaatatattaagtgagggaaatccttagcatctacttatatttgatctattgtttttgtatctgacactgggttggattctggatgtatggagaaaagataactaacatttattaaatacagaccagtgtaaatatgtacatatgtaaaaacatgactaggcatataactaaattttttctataccaggctaagatgtagaacacatttctggcatagccaaatatttctctaattaagagctgaactactttgtaactgttgtatataaggaaaacctagaaacaagcatagtattatgtgttcaagtcagtacttttaagattttcccagtttacaggtatttcttaggtaagtatagattctaaaatgattgtgaggattagatatgcacttgtacataaaaagcctatttctccttcctctcctcaatctgtgttataattttatagaaatgcctagctagtaaggctcatctagatagatcaaggcaagctgaagatgaacaagaaggtacatgactctcaagtcactaaacccaataggataacaacagaatgctccgactatcaagcctcggtgtgtgctggcagtttacaggcttactgctcttctttcaggctataaataactacaaactgtccttgtccccaaggagaccttagcagccagctcaaaggttaaaatatggaataattctcactttggatgcaacttttccagtcagcaaaaaaaatcaaaaaagcagaaaatgtaatgccaagttaagttagggcagggggatcattcccttgccctagaaactatccactatgtaacagttattgatataaacatgttagcaaaattatttaccccaaaaatatgtccaggaagaatgcaatgtatctctgctccaaatgccgaagtttgtcctagaaaggggcagatgccactcaaacaccttgtaggactgcaactccctggaccttaaaaagacttcttgaatttttgttttacttttaatttaggcacaaaggattactgagctaaacacatccacataacaacatcagaggaaaaaattcctctgtctccatttggatggaggatccagcagaataatggccgcaacaagcacaggtttcacaagatctgggttaataccatcaggtgacatgctgctgttgttaattacagaacccctgctaggaagaaaaactcctccagctgcttaaaaaaaaaaaaaacagaaaaagagaaaatagagttcctcagattagacttttccacactgggaaatacctgaaatggaaggacaggaatccgaatcaggaaacaaacctgattacaaaggggctatttcacttcagagtgggtctcagttccaaaagagaacatctttagaaatgaagtcagaaaggcaaacgcaagcaatcaacaacttctccattctcacaaattagaatcatgtgttgattccactaaatggcttgggcacaaatctctagggccacaaagagtgaacttgggaaagatgaagattttaacacgtcccacatgttataaaagatgcctcctctaggctgagaaaatttacttattctaaagaagagctgaaaaaggatcagaaaaggaggaagcagggaaaagccctatggtaagaagattccatttattacataagttaatattctcacagctgttttccaatttgagaggttatggtctttgacccactcccctcaatgatgactatgaagaaccttataaaatctaaacagtaaacagatgaaaaggctggccctaatactatttaagcatgtccaatctgcaaggaattcaaaaacagaagagtcatttcatgaaacaaatagagcttatataaccccacagagtcccctggcttttatagaagccaaattcaacaggcagttctctttggccatctatacttcagccaagccatttaaaaatatttcttgctaacatgattcggctatggaagggacccaaggaatgaatttcaaaggagaaagtctaattagtcttagggcatacaatttgaaataagttcattaacttggaaactgaaaaggcccacctgctccaggggatttggtctcctacaagggcaactgattatgttcagcattaactattactatccagcagtaaagaattcagtattcccatgagatacttttcttcctgaaaggcacctagacctccttccaactttaaaagagaagggaggtatatgtatgtttttaatcttctcctttacagtcttaactaaaaaagcctaactactatttacatggaccacgtgccttacctagaaacaatctgcagaaaataaattccctcttctaacattattaaaaataagcaaaattctatgttaatgttacagttctaagtaaacgaaatggaacaaaggatgggcaggaatttctcagttttaaatgttcattccaaaattcatgactcaaggaaaaagtaaaaccacacaggcagacaaaatagggaaggttagacagaatgtctgtcttaacagaatttcctggctcctgatgatttgtgtcagaatttaaaagattaaaatgcaataacacctatttaacccaacatgactctgacaaaacatacacaagctttggaagctaaaaatttcatactacaaagtaacaagttttcagatgttacacaaaatggtggagagttttttttctgtaagttacccagagagatatgagctccaaggtaaaatacacaaaggcaatttgttcaaaatcaaactccttttataaagtaaaatgaagcctacaaatttctttaaggtatctctcttttttttttttttttttttgagacggagtcttgttctgttgcccaggctggagtacagtggtgcgatttcagctcactgcaacttctgcctcctgggttcaagcaattctcccacctcagcctcccgagtagctgggattcaggcacgtgccaccatgcctggctaatttttgtatttttagtagagatggggtttctccatgttggccaggctggtctcaaactcctggcctcaagtgatccacctgcctcggcctctcaaagtgctgggattataggtgtgagccaccgcacctggtcccaagtatctctttttcataaactgtaattctaatttccctgaaggtcttttatgttttttctgtttgtttttgtttttgttttagacaaggtcttgctctgtcacccaggctggaatgcagtggcacaattatggctcactgcagcctagacctcctgagctcaaattatccgccacctcagtctcttgagtagttggaactgcaggcatgtgccaccacacctgtctaatttttgtattttttatagagatgggtttttaccatgttgaccaggatggtctcgaactcctgagctcaagcaatcttcctgcctcagcctcccaaagtgctgggattacaggcatgagtcaccatgcccgaccttcctgaagaacttttctaggaagaaaaataatctgactctaaggtttccgtatcatatattatcaaccattgattaaaaatttaaattcaaatatcatttctcccctccaccattactgtaaagtcttatcctatatctagaaatcaccagagaagatcagaataaatagttctggcttactccaggtaagaatatttagaataaaactttttttgaagacacttatagaaaatgtttatttaacactgtaataattcttattttaaaagaaaatcttacacgcttaccttatatgactttaactttttaactttacctatcatttgcactaaaatgaaacagtagattgtactcaagaggtgtatttttaaaagtcatggtaaatgtttttatgcatttcattctgctttttccctcatgattaaactatatttaaaataaaactatgtaaaaactcaccaagttaagtcagtaggaaaactctaatttgtcttgtctaacaggaaatctctgttggaaatagagaatatgaatcagacttaactagattctgaatctcatacaagtctttacttactttgtctattcctaaaaaggaaaaatctcacaaaagcaggtgatatatgaaagaagaaatgactagtaaaaatttactagtcaaaattaccattcttaggccaaggtgggtggatcacttgaggccagaagttcaagaccagcctggcatcatggtgaaatcctgcctcaaccaaaaatacaaaaaattagccaggcatggtggtgcacgactgtagtcccagttacttaggaggctgaggcacaagaattgcttgaacccggtggaggagggacacgcagggcagggcagagattccggtgacctcaaaatcatgccaccgcactccagtctgggtgacagagtgatactctctcaaaaaaaacaaacaaaaaaattaccattcctttatctcactagctctgaatgctctatttcttagtcatctctcaaaaaaatattatacttagaaatggaagtcagaaaaatccaagctggttctccttttttttgagatgaaatctcagctctgttagccaggctggagtgcagtggagcgatctcagcccactgcaacctccacctcccacgttcaagcaattctcctgcctcagcctcccaagtaggtgggattacaggtgcctgccaccacgcctggctaatttttgtatttttaatagagacgggattttgtcatgttggccagactggtctcaaactcctgacctcaagtgatctgcccacctcgacctcccaaagtgctgggattataggcgtgagccactgcgcccagccccaagctagttcttctaataaactgacctatgagtgcagcaaaaatgaggtgacttgtcctgtgtcaatatttacaagaaaagagagatcactgttgccagctctttcacaaaatgcttaaagaattattataagtttttatgtaaaacaccttttaaaaaagtgctctatgggtaaattacaccaaagcaagatgcatttaaacaaagccatgtatcctatggttttctgtttagagacagggtctcactatgctgccccagctggagtacagtggctactcacaggactgatcatagtgcactatctcagcctcctgagtagctggcactatgcaggcacacgccaccatgcctggccctatggttttaataaataactgtgacaatgagatgcagaatggactggattaatagtgattatacaagggagagaaagaggttcctgttgaagactggagagatagccaagcaacaccaacctctgataatctaccatatcctacaaagtagctcaaaacagaaactgggataagagaagtagcaatgcttctaggagtctaacataggcagaaaattccactgctatattcccttttgtgagaaaataaagtattgcataaatcatgggtaaatgattccttaaaaatagaatctcggctgggcacagtggctcacacctgtaatcccagcacttgtgggaggccgaggcaggcggatcacgaggtcaggagattgagaccagcctgaccaacatggtgaaaccccgtctctactaaaaatacaaaaattaactgggcatggtggtgcacgcctgtagtcccagctactggggaggctgaggcaggaaaatcacttgaaccccacagtggttgccgtgaacagagatcgcaccactgcactccaacctggtgacagagtgagactctgtctcaaaaaaaaaaaaatagaatctcttcctgaaaatgtaagcaccaactttaactagtacatggtacaaataagcttctcttagactataataggttttggtaaaccaagtccagttactatcagtgatcaaatgagccatcaccaaaaactgtgctaaatgactgatgctaaaacagggcagtcttaatcagataccataaaataaattcacctgaggtcaggagttcgagactagcctggccaatgtggtaaaaccctgtctctactaaaaataacaaaagttagccaggcgtggtgacgggcgtttataatcccagctacttgggaggctgagactggagaatcgcttgaacctgggaggtggcagttgtagtgagcagagactgagccaacaatcccacgtagttcagttaataatagcaggagtcaggctgaattcatgcaacaaatatttactgagtaccaactgcagggcattctttgagacacagtggtaaaagagacagacaaggttcccaaccctctgaggatagaaagatagaatgcctttaaggcagaagatatcaaccaactctaacaaatgaaaataaatagctgtgattcttaaagcagaaaccaatacctttagtcccttactctccacttttttttttaagcttaaggtttgggtttctcaaaatttaaagcatctgacaaaactggtaagggctgaacagggagactatcatactgttggtaggagaacaaactggtaccaccagtttggaaaatagtttattattatctaataagactaaagattctgcaattccactccaagtatatggcctagagaaacttctgtacatgttcacagcagcattgttcattaacagccaaaaactagaaacaatcaaagtgttcatcaacagaatgaatacataaattgtggtatattcatataacagaatgctatatggcaatgaaatcaaactacagttctatatagtaacatggatgaaagttatgaacatatatattgttaggttcttcctgaaagaagacataaaaatgtaaaaatcacataatgtattattccaatttatacaaagtttaaaaacagacaaaactaaattatattggtttagaatgaatcctaggtggtaaaatcataaagaaaaataaggatatgattatcacacatgtcagaagagtggttattctgagcaatggtatacgttatgatctagaagggagacgcagcaggcttcttccaggtgctggcaatgatatatttctaggtctaactggtggttacctaggtatttgccttctgtaattaatccttacattatacagtcatgctttgtgtatttttctgttatatttcataataaaaatgttcaagccaggcatggtggctcacgcctgtaattcgaacactttgggaggctgaggagggaggatcacttgagatcaggagttcaagaccagcctggccaacatggtgaaacaccatctctactaaaaatacaaaaaaaattagccagatgtggtggcgcacacctgtaatcccagctacttggaaggctgaggtgggaggatcacttgaacccaggaggcagaggttgcagtgagccaagatggtgccattgcactccagcctggatgacagagtgagaccccgtctcaaaaaaaaaaaaagttcaaagcatacattattaaaataacctaatagagtagatgtctatctagcctccaataatatataagtgtgagtacatcttgcaaataatacagtttttttaaaaaaaaagacaatttaggatgagaagtcagtaataaagcagggccacccaggaataaatacctataggcaggattttctattacgttctttgaatttaaatgccatacctaagatctatatttcagggaaattttctgtactaatataaaggtttaaatctacatatgactaccaccaggaaccatgagttaatccccaaattattttgagacaaaatcttctgaaaaagcaaagccaagacacaagtattttttggttttactagtttaatcatggcctctgatggaacctccagtaaaatcccaactccctctgagtgaaagccttacaatggccaaaagggtcctgcacaatctggacttgattacctctctggcctcatttccaactacgttttcctgatctcactatgtaccagctacactgccgttctttgttgtgattcctcagaataagcccattcctgccttggagcattgtacgtgtcattttctgtctgaataagtcttcccctagatgttctcagggcacactccttcaccattgctaagactttccttgtcaccatctctgtgaggtcttccctgatacccttaaaaatgaattcctggctgagcgtggtggctcacgcctgtaataccagcactttgatatgccgaggcgggtggatcacttgaggtcaggagttcaagaccagcctggccaatatggtgaaaccccgtctctactaaaaacacaaaaatcagctgggcgtggtggcacacacctgtagtcccagctactcaggaggctgaggcaggagaatcgcttgaacctgggaggtggaggttgcagtgagcagagattgcattactgcactccagcctggatgacagagcaagactctgtctccaaaaaaaaaaaaaaaaaaaaaaaaaaagcaattccctccgttaacaaccacaatcctattcctgcttcatcatttttttttctatagcgcataaagtcatctaccatcctgtatctttttacaatctgtcttctctaactggaaaataaactctaccaagacaggttcttgtctgttttgctgctgcacccagacagtgtctggcacatggaaggctacaaatacttatttaataaatgactgaattaatgttttcttttagattcccgtgcttgaaagattagacagtaactctatagcacaaaaaaaaagaaaaaaaaaaaacccagaatgtttctccccttgtatgtcaaattaacaaagtttattttactaacaagtttcaggtttatgcacttattaatattaatgagtcagagttaagacttctaaaaagttgatacaaacatattttcccttaacaaatgtgtaatagtggccaggcacggtggctcacgcctaaaatcccagcgctttgggaggccgaggtgggtggatcacctgaggtgaggagtttgagaccagcctggccaaaatggtgaaaccctgtctctaccaaaaaatacaaaaattagccgggtgtggtagttggcacctgtactcccagctactagtcaagaagctgaggcaggagaatcgcttgaacctgggaggcagaggttgcagtgagccaagatgacgccactgcactccagcctgggtgacagagtgagactccgcctcaaaaaaaaaaaagtgtaatacctgtttttaataacaatgccattgagggcacaaagagacaagaactctcatgtactgctggtgcggtgcaaatcagcataactattatgggaactacttgacaatatgtaggataaagattgagtacttactatatatactatttaagtttgtaaaaagtgagcacattttacttttatagtcagaaaaaaaaggtttttaaaagaaagaatcatgcaaaaaaatatataatttcaataaaaaagttcttcagcaccttgggaggccaaggcaggcagatcacttgaggtcaggagtttgagaccagcctggccaacatggtaaaaacccatctctaccaaaaaatacaaaaattagctgagcatgctggcatgcgcagaggttgcagtgagccgagatcatgccactgcactccagcctgggtgacagagtgagactctgtctcaaaaaaagagaaagttctttatattgtattttgactccaacaaaagcaataaaggcttctgttacatatccagatgaaatatctcaagagggtaactacagttagaaaaataatggttttttacttaggaactaaaaaaagttttatagcagtttccagagtggaagggaaaacgaaccctacagtgttagtgttccatataagagcatcattttcttctaaagaaagatttaagataggaacatttctctgtagcataaaatgtgggactgatgtgacaaagagcaggtaaacaattccaatcaaacttggtgactatgatggcatagggaagataattcactgaatgaaattgcctattgggtgacatgacagatacttccgagtatacatatagtgcttgtacttttgatggaatacgtcatctatgttaaagttggcgtaagcctagatccaaaggttactttccaaccacaatacttattacctgaaccaaaccctaagacaagaacagatctgagataaaatacacaggcatctgatatactagttctatttattactctgatttctatttgaaggtcttattggttgtcttaaaaaaaattcagcacataaattctcaaattcttaaagatagttgatatattcatgagacaggtggctgcccaaactagttgttaagaaaggaagtcctactcaaacgcttgcagcaggcagagtgtgttattagagaagagtaacagttttcatttgtaacacttcaggattccaagtgctcaaagctctgaataggagccaggtttaaagggtgaaaaaacatggagcataaaaattaaaaatatactcaacctcacaataatgaataaggcacagtggattaaagactccagaaaaaatttataaatgaaaaccactggcaattgaaacatatggtccttgaacaaaatttaaatgtaataattctaatcaaatatcgaggtgaagacatattttttaaatgctacctttggctaagaatgcttcaagaaacccttctataaatatcaactatgtctggatcacactgaacttataaagtaatataagaagaacatgaactggattggagatcactaaatagtcccacacagtagggagaaaatattctagaagaaggccaggtgtggtggctcacacctgtaatcccagcactttgggaggcccaggcgggcggatcacttggggtcaggagttcaagactagcctggccaatatggtgaaaccgcatctctacaaaaacacaaaaattagccaggcataatggcaggtgcctgtaatcccagctacttgggaggctgaggaaggagaatcgcttgaacccaggaggcagaggttgtagtgagctgagatcgtgccactgcactccagcctgagcgacagagtgagacccgtctcaaggaaaaaaaaaaaaaaaagaaagtattctaggagttaaaaagtagtaaaagaaagcttacaaggagaataaaaggtgagcagtaactgaaatttattaaaaaacagttaataacatgagacaacagaaatgcaaaatattaaaatacaaagctggccaggtgctgtggctcacacctgtaatcccaacactttgggaggccaaggcaggaggatcacatgagctcaggagttcaagaccagcctaggcaacatagtgagaccctgtctctaaaaaattaactaaattaaaataaaatgcgaagttgccaaatttatcagattccaaaaagaatccataaggaaagaaaatttcagagcctctcattctctgataaaagaagagtatcatttcaaagtatagaaggttttcctcatccctctccctccctcaaataatgactataaataccaaagtgttggacccagtgggagaactcaaataatgaggtagtttaggacaaaatcaaaccactgaaacaaaagaagaggagaaggaagaagaagatgatgatgatgaggacaaagaccagaaaagatatgtacaaggttgttcactagttgtctgtaatgtaatggggggtaaaaaggaaaacaatttaaatatccatcaaagggattgtggaaaaactgtgaaatattcatactgtataataaaaacaaaacagctaaaatggaagacctagatctgaatctaccaacatgtacagattttggaaaaaaagaatgaaaataagactgctgcagaacttatatacatataaatatatatacatatgcacatatatactcacacatatgtatataatttattgtctaaaaattaaacacgtaaagcaatacattttcatacatacacacatacatacatacacatctatattgcactggaatgatacacactaaattcatggcaataggttgtctctggtagtgaaggatggaaacagaactgaaagtataaataaataaaactttagctgacagtgtcacagtctctttttgtttggctttttctttttttaagcttttcaaatcgatgaattcaggaaaaatggtaaattagaaaagctaaagattgcttaatgacttgtgatataggaaaaaaagctaaatagctcaaagcaatattttaaatagatactaatgcagcctaaatcaaaccaaaaagagcctatgaattcagtccagatcatctcactaaggaaaatcctgtgttggtaaatatttttcctatagctgatggaaattatacagcactggggttccttaagcagagaaagtatagggactgacttcataaatgtcaataagaaagcacatcttctttctttccttctttttttttttgagacggggtctccttctgtcacccaggctggagtacagtgattcgatctctgctcactgcaacctctgcctcccagattcaagcaattctcctgcctcagcctcctaagtagctgggattacaggcacgtgccaccacacccaactaattttttttttgtttttagtagagatggggcatgttggtgaggcgggtctcgaactcctgaccttgtgatctgcccacctcggcctcccaaagtgctgggattacaggcatgagtcaccgcgcccagccagaaagcacatcttaaataaaaataatgtccacagtaatctgacatatcttcataaagaccataaatccttatactttgccttaattttatttattcctctaagaaccaatctctcttttaatcatctcaaattttagtacctgaaactcaaagacagattataaaaagaacacttaaggcttttttgccttcttgaattcacttaagctttttttccccttctttcaaacatgtttttcctccttcttccttgacgtttcccatctccaacctgttgttgtttttttttccttccattatctcactgaccaacagttgctttcaactgctagcaagcctctggcatatttatatttttcacttcttaaaggaaaagatgctcccactccacagcccaaaggtcaaataaaggggaaaaaacacataaaaagtactaaccatattttgctgcctttcctttctgtattatggctaggaataaagctctaattgccaaataagagagcaaaatcaaacttacctgtacattttatcatctttataacatttaaatttatccagggtcctctgtttcacaagtcactttggttaggaattataaggccacttaaaataggccactatagttgagcactatagtctagtggaaaccataacctcaagattcacagtagaggaacaacctaggccaggcgtggtggctcatgcctttaatcccagcactttgggaggccaaggtgggcagatcacttgaggtcaggagttccagaccagcctggccaacatgatgaaacctcgtctctactaaaaatacaaaaattagccctgcatgatggcgcaagcctgtaatcccagctacttgggaggtggaggccacagtgagccgagatcacgccactgcactacagcctgggtgaccgtctcaaaaaaaaaaaaaaagagagagagagagagaagcaacctgtgcatttccacccccatcctcctttaaaaggatttccaaggtcctttccagttaaatgctttaagctatataaccactccctcataagcagtattcaatgtttcacagtcttcaaagtactctgacatttatgatcttatttgggattttcaacagctctgtgaggcacacagagcaagcaagtattttacaaataagggaacagaagctcagagttccaatttgctgtggtcacatggctattaatgggcttgagtttagaacacaaagtcttttaactcctaaaccaacactttgcaattcctttggggtgactcttagatcaggtatggtcttttattcaacatgtagaaatggaaaaaatacctgagaaagatacttatattctctagctttcagttccaatttcattttcaagtggcaactcagtatgaaagtatgttcttttggccgggcaaggtgactcatgcctgtaattccagcactttgggaggccaaggcaggcacatcgcctgagctcagcagttgcagaccatcctggccaacatggtagaaccctgtctctattaaaaaatacaaaaaaaaaattagccaggtgtggtggtgcatgcctgtagtcccagctaatcggaaggctgagcgggaggctgaggctggagaatcgcttcagcccaggaggcagagaggttgcagacagccgagatcacgccactgcactccagcttgggctacagagtgagtgagatgccgtcttaaaaaaaaaaaaaaaaaaaaaaaaaaaaaagttcttttgttctaatgaatttggagcaccattattaatggagacctcagcaaatcattaatgggttcgtgtctacttccatgactggatcctgggaacgaatcctatgttgtaattatttttattttttttaaatttttttatttcttgagatggagacagagtcttgctctgtcacccagtctagaatgcagtagcgcaatctcggctcactgcaacctccacctcccaggttcaagcgattctcctgcctcagcctcccgagtagctgggattacaggggtgtgccaccatgcccagataatttctgtatttttagcagagacggggtttcacagtgttggccaggctggtctcaaactcctgacctcaagtgatttgcccaccttggcctcccaaagtgctaggattataggtgtgagccactgcgcctggccctcctatgttgtaattattttagaatgacttttcatgccttagcacctaatcatcattaattttttcaaataaaatatctattgttctaactgccagagtaatttttctagtctaagttttcaagaaaccagtgtctttctccacagttaccttcctctcctttgccacaagcttacagaaaagcacaatttttaccattctttaattatattcatttcaggtgtccatactaactggcacctcttcaactcaattgcttaagctaaaaaccctatcttttcctatcctctttatcaggaagtcctgtcagctgtcctgcttctcaatgtattccatatttatccatttttgtccaagccagagttttctcacctgaatagttactggtttctaattgatctcccagcttcctctgtagcccaatttatgtattcttcacatagcagccacagtgagcttttaaaatgtaaatccagatattgctccttcacttaaccacacttagaattccagctctttatctgaacctacagagtcctataagagctggcccattataccaaattcatcacctaccactctcccttatcactaactttactccaaaacactgggttttctttctacaaacaagccaagattgtttccatcttagggcctttgcattcttccctcaggctggaagacgcttcttccagatattcacattgcttcttgttacttaggtcttctctgaccatagccaaaagtagtagctctactcctacacctgctatgaatgtttcatgtgacttaatcctctacactgtgggtgcacttagaataatcacatgtggtcctgccgggctgagactcagaacctagacaatgggggctctcctcaaagaatgcccatttctacgtcagaagcagctccctggtctttttcttttcagtgcccaacagagtacctactaaactctttttactttggatgtaaattttttttcttttttgagacggagtctcactgtgttgcccagactggagtgcagtggcggatctcgactcactgcaagctccgcctcccgggttcatgccattctcctgcctcagcctcccgagtagctgggactacaggcgcccgccaccacgcccggccaatcttttgtatttttagtagagacggggtttcaccatgttagccaggatggtcttgatctcctgaccccatgatccgccagccttggcctcccaaagtgctgggattacaggcgtgagccaccgcgcccagcctgggtgtaaaatttttaaacaaagccatacttaatcttagaaaattttcctataatgttgtttaggtctctctttttaaaaattacatcacacctctagattctgtattttttatttgccttaaagaaatcagccagaagcggtggtgtcccattatgactagtttttgttctctttaattgatagaaagtaaactatgggccgggagctgtggctcacgcctgtaatcccagcactttgggaaccaaggagagcggaccacctgaggtcaggagtttgagaccagcctggccgccatggtgaaaccccgtctctactaaaaacacaaaaattagctgggcgtggcggcgcatgcctgtaatcccagctactagggaggctgaggcaggagaattgcttaaaccgggagggggaggttgcagtgagctaagattgtgccattccactccagcctgggcaacaagagtggaactcggtctcagaaaaaaagaagaggccgggcgcggtggctcacgcctgtaatcccagcactttgggaggccgaggcgggcagatcaagaggtcagatcgagaccatcctgactcacacagtgaaaccccgtctctactaaaaatacaaaaaattagccgggcatggtggcaggcgcctgtagtcccagctgctcgggaggctgaggcaggagaatagcgtgaacccgggaggaggagcttgcagtgagccgacattgagccactgcactccagcctgggcgacagagagagactccatctcaaaaaaaagaaaaaaagaaaaagaaaccactagtttcttactttatagtacatagtttactttcatttatttatttattgagacggagtttcgcttcttgttgctcaggctggagtacaatggcacgatctcggctcacctcaacctccacctcccaggttcaagcgattctcctgcctcagcctccccagtagctgggattacaggcatgcgccaccatgcccggctaattttgtatttttagtagagacagagtttctccatcttggtcagactggtcttgaactcccaacctcaggtgattcgcccgccttggcctcccaaagtgcttggattacaggtgtgagctaccgcacccagcccatagtttactttctatcaatttagaaaacaacaactactcatagtgggaccggggagatgagatttgttttccaggatgagaaattggcttataaatagaaaaacaggctgggtgcagtggcttatgcctgtaatcccagcactttgggaggctgaggcgggcagatcacttgaggtcaggagtttgagaccagcctagccaacatggtgaaaccctgtctctactaaaaatacaaaaattagccgggcatgatggtgcacgcctatagtcccagctactcgggaggctgaggcaggagaatcccttgaaaccgggaggtggaggttacagtgagccaagctcgtgccactgcactccagcctgggcaacagagcaagactccgtttcaaaaataataataacaataataaataaataagtagaaaaacaaaaagtagagatatgagtatttttggagatgaagatctaagtaataccagcaattttaacaaataccttatacagtgatagtaaaaattgacaaaacttgctaatactaaatttttccagagtaaaagactaagctgatttgaataaagtgatggaagttctaaatactctttgtgggcaagaagtttgtacccagaacatcctgtattgtgcctagcacagagaaggtgcttcacaagaaaagtctggtgaataaaggaataaaatagctctggagatataaaaggacttaataatatccagtcaaattatttcattttacagatcaaggaactgaaccccaaagcagcttagtggcttgcccaatgtgttaataatacacacaggaagccagcagcggagtttagaacagtacctagctatcatactatctccccacagttatgtgaggaaaaaaagagatgttgggctcaagaatttcagtgtgggtaaatgaaagataaaagattggtgaaaaataatcagactgtaattcaggatattgggtccaataatgattgataaattggaatagcacaagaaagatattggtgaggcactatagttaccattaagtagggtccaaatgggccaccaaattctcctcattatcagaaacgatactagaaacaaaaccagaaaacacacacaaaattgacttccctcaacctagctttccagtcttatctaatgtgactgttcaaattaagtcaactgtcaagctactcaattccactgctcagtctatattcacaacaaaattaaagtggctatacaaactggattcctcctaaggatatggagttacaaagataaatttgcaactctatttgttcttggctcctgtaaccttttattttcaattcaaccaaatctttactgattaaaacagcacagacataatttgactctgattcttaagatgtgaaaggtgtctttatttccggaataaaaggcttcctttatttcctctttcaaagcaaagattcatcctatcatcttaatcaaattattaccaaatatttagagtacccattttgtgataggcctatggatcattaaattttggaagaataggcccaacacgatggctcatgcctgtaatcccaacactttgggaggccaaggcaggcagatcacttgaggtcaggagttccagaccagcctggccaacatggtgaaaccctgtctccactaaaaatacaaaaattagccaggcgtggtggcgggcgcctgtaatcccagctactagggaggctgaggcatgaaaattgcctgaacccaggaggcgaaggttgcaatgagccgaaatcgtgccattgcactccagcctgggtgacagagtgacattctcaaaaaaaaaaaaaattggaagaataagttttccccaccaatactactacaggtggatcatccctaacctgaaaatctgaaatgctccaaaatccaaaactttttaagcacgggtatgatgctcaaaggaaatgttcattagagcattttggattctgagtatttggattaggggtgtaaatatttcaaaatcagaaaaaaataaaaaatctgaaacacttctagtcccaagcattttggataagggatgttcaacctgtagtagagtcaccagagagacagattttaatcttaaagctaacaactaatcttaacattagtaaatgtgtttctattgcttgtgcctaactgaagtcaatcaaccataaaaaatattcattgaatgtagtttgaatgtccagtcccatgctgaactgccaatctcaccattaccaatgtctttgtgtggtttgaataaggagaaagtgtttctggccttgaagagccaggaaaagactcaacttaaaagagtaactcatatgttcaagaacttaagagtttctcttcagtacataaaatttcctcctctagacaatttcctaccatctcttacagtaaattcttcctttaaatagcaagccatttagaagtcaccaaaactataccctgaccctttcatccctgcataccaaatggaacaaaaacacagtaaaaccaattttaaacatctagaatagtcagctaggaattcaaatcaggaagggaaactttggactctagacccaaattcgcttcaaataatacttaaggaacttataaatatatttctaagggattgggcccctcaaagttacaaaacatggggaagagttaaaactaccactttatcattattgccagaggtagttgctttaagaactgtcttacaaaggtcagcattttattgggtcttccaaaaatcaatccttcacaatgagaaatggacgtcagttaaataaactgttagaataagaacaagtcaatatattcataagctattgctatcctcagggcctgaattctagtgcaggcttgaagatactttcctgaatctgaatttcctcattttttttccccctcatctttaattgagggtgactgtgtaagaatctctaaggtcccttcagtgctaaagttctatgcccctttggaaacactgttaaaattgtatctacttttcttcatatatgcattttattttaaagaaaagcaatatatatacataacctaagtaattcaaaagttacaggaagctacaattgaaaagtaagtttccttctagatttcaaatccctctctaaagcctttagagagggattttttatatcctcaaaacaaacaaacaaacaaaaaatgaacacaacaggcatctaccagcatatatatatataaaatacaaataatattttccctgtagacacactttattctttctaatggttgcagagaattccactgttaccctgccgaatggtttccatgtttttgctactgcaaacaatgtagcaaacaagtatatctaaacataagcacaagtaggcccaatagcctgcatgctgtttattttgatattgtcaaattgccctccaaaatatatcaatatgtacttccaatgtgactcccacttgagcatctaccctctttgatacattcaggatggtcagagatagtcacagaagagtgggtacaaaaaaaacctttcagtagaagagccagtgagatttagaccaaaaaaagagaaagtcagaaatgccttttataaatacaaaaataatataaatatataatataaatataatatacacaatatataagtatataatagatatgatatgtggtactttgtttacaagatttaagtgttgatgcttccttgcagagctctgaaagaagatacagacagaaaaaaagttttttctattcaaggagagtaggtgagcaacttgtattgcaaatcctatgaatcccaagaaggcctaattctgtcttagatcaggatgtgaatttaaatgtacaactaaattcctctacatataatctggcctctttcacccagaaatggttattagcacagtgaaagtgaatttagttctttgtctttgtcactgacaaaggatacctattaatgcagccattatcccccaattaaataggacagtgcacaattccagaggtgataaacatgttagtaaaacacatagacaacaattcttcaggcatttttaaaactgtttgttttttactagtgacagtgtctatctatgttgcccaggctgttctcaaactcagggactcaagtgatcctcctaccctgacctccccaggagctgagactacaggtatgctgccaccacagccaactaaatgtttaattaaataactgttacaatgtctggcatgtagtagatactgaataagtaattattaaattaattcatggcatccactttggaaattatgttagtttcttttttcctttctttcttttttttaaagagacagtagcactttgtgaggccgaggccagcggattgcctgagctcaggagctccagaccaccctgggcaacatggcaaaaccctgtctctactaaaatacaaaaaattagccgggcgtggtggtacatgcctgtagtcccagctactcaggaggctgaggcagaagaatcgccttaacctgggaggcggaggttgcagtgggctgagatcgcatcaatgcactctagcctgagtgacagagtgagactctgtctcaaaaaagtaaataaataaaataaaataaaatggcattctggtttattttgtcaactgttagtgagttttgctaactacttttcccaagaccaattaactctggtaacaatgaagaaactgagtttactagcaaaactgaggaacagatcctgaatctttaagactccaccaagttaacagcatcctaagagggcctgtcagaaaagccagtcagtcaccttatggtgccttaccttggtcaaaacttgtataatttagtgaaaagaatgtaacactaggaaggagatacttaacatacacccctgataagctctgaacatggttatatactttaaaaagaaagttactgagtttaaaaaagtactagtcagttctcaattttccatattaaaggatgtaaaaagtgatataaatattccaaaacaggtattaaaaaagaaattcttgccgggcgcagtggcttactcctgtaatcccagcactttgggaggccaagacgggtgtatcacgaggtcaggagatcgagaccatcctggctaacacggtgaaaccccgtctcgactgaaaatacaaaaaattagcctggcgtggtggcgggcacctgtagtcccagctactcgggaggctgaggcaggagaatggcgtgaacccgggaggcggagcttgcagtgggccgagatcgcgtcactgcactccaacctgggcgacagagcgagactccgtctccaaaaaaaaaaaagaaaggaaattcttaacattttagtttggaatgcatgatgtaatttttcctatagatttacatccaaaattctatcttggctgaaataatagtaattatttacgtagcctggacatagattaaaagacatcatgggagtgaattcaagataaaataggaactcagcatgagataaatgttgatggataatgtatatgaggataatttaaaactactatataataatttctctcgatctcacagcatattctaacagctcagtcttagccataaaataattttcgaatgaaaaaaatttttttttgagacagagtttcgctcttgttgcccaggctggagtataatagcgcaatcttggctcaccgcaacctccacctcccgggttcaagtgattctcctgcctcagcctcctgagtagctaggattacaggcatgcgccaccatgcccggctaattttttgtatttttagtagagacggggtttctccatgttggtcaggctggtctcgaactcctgaccttaggtgatccacctgcctcagcctcccaaagtgctgtgaccacaggtgtgagccaccgtgcccagccaggtattcttaaaagttatgtaataatctctgtgccagaaagaacttcagaaaccaccttgtctgaactctttgatattacaaaagaatctgagatccacaaaagttgcaactagtctatctatagagaactacaaagtaaaataaatatttaagtattgggaagatcattatttaaataatccacatataaagaacctttctccagtatttcttgtaaaaagagacttcaatgtatccagtttgcttaaaattaggccacatctagatactgctttatcttacacttgcatactacacaacttcagatgtactaaaaataaaatcagtcctctgggacataactcccataaaaacctctccactacaccacaacacaaaccctcctctccaattagttgactctagcctgtttgtcagctcatacatacaaccatatgcctttctcaaatttattcataccaccccgaaagccagaaatgttctacctcctatctgaatactacccttccaggtccaagtcaagtcctaccttgttctgaagcatttcctaactgccccagtatactctaaattcctagtgtcactttcttggcagttaacaaatgttactaagaacccattagctgccaattaacgtaggatgcccagaattttaattctctgtatgtttttccctattccaaaattctcttttataggtctagtgagatctaggaattggtacttaaaaaacaacttatcagatggaaagaagaaaacagttgctatacgaataaaactgatttaggccaggcgcagtggctcacgcctgtaatcccagcactttgggaggccgaggcaggcagatcacgaggtcaggagatcgagaccatcctggctaacacagtgaaatcccgtctctactaaaaaaaaatacaaaaaattagctggacatggtggcgggcgcctgtagtcccagctacttgggaggctgaggcaggagaatgtggtgaacctgggaggcggagcttgcagtgagccgagattgcgccgagattgcgccactgcactccagcctgggcgacagagcaagactctgtctcaaaaaaaaaaaagaataaagttgatttttttacctttatcaaaatgtcctttaatgctgtttacatattttttcaattacaagaatatttaaggaataattaggaaaaatctaatattgtacagcaattctacttcaggaataaatcctaaggaatcaatatgattgatgtataaagatttatgtacaacgatgttcatcacagcaaattttttctttcttgagatgtagtcttgcactgtcacccaggctggagtacaatggcgtgatctcggctcactgcaacctctgcctcctgggttctaacgattctcctgcctcggcctctcgagtagctgggattacatgcacccgccaccacgcccagctaatttttgtatttttaatagggacggggtttcaccatgttggccaggctggtcttgaactcctgaccctatgatccactcgcctcggcctcccaaagtgctgggattacaagcatgagccaccgcacccggccttttttttttttttttttttttgaaacagagtcttgctctgtcacccaggctagagtgcagtggcgtgatcgcggctcactgcaacttccacctccccgggttcaagcgattctcctgcctcagcctcctgagtagctgggactacagcagcgtgtcaccacacccagctaattttttgtatttttagtagagacagggtgttaccatgttagccaggatggtctcaatctcctgacctcatgatccgcccacctcagcctcccaaagtgctgggattacaggcatgagccacttcgcctggccatcacagcacaatttataaggaaaaactggaggaaaaaaattcattattgggaaattggccaaataaagtatgattaatccataaaacagaattctatgtagttactttgagaagttatttttttactggcataaaagaggtctacaatatgctgaatttttaaagcaattttaaaaacacacaatcaattttttatagatataaatatctacatgcacatacacatttagagaaatgcccaataagatgttcagaaaacgttaactgtagttaactctgtatggtgggatttggggtaattttttacttttttctttatacttttctatttttttccacaaattatttcataatcagcaaaagcaaatacttttattctgaaaaaataccatgttgatttttaaatctctttttaaggattcatgtggagtgcattactcccttttactactaacaccaccaataaagagccacataggtgctcctaatgagaagtaattcctaacaatatgtcaaagtggactgcaaggaacttccctgctgttttcatgttgtttcttcaagccagcaagtttctgaaataatttacccatagctttcactgaagggagtttctcacctatgcagaagatgtttccatcggcggtggcaggacagatagcaatgagtcaagtcatatttcaaaggtggaccatcaccaccaccatcatcagacaaccaagcggagaagaactaccactgctgtagcatctctggtcaacagatttgagtactgggatacactgagaccaacatggtactctgtgtctttgtgttgaccaaatgtcaacgtcaagggctcccacagccattctacttcatgtgctcatccatgctcccacaccttagcaaagatctgcttgcaactttctccacttcccagacaccaacttctgaatttttctcagccctcttatccctctactaagaaggagagaagagttaaaatgagaaaataaaaagtgcaaaagcccaaaggaggacctagctgggtatgctggaagaatagaaagaagggcagtatagcttgaacacggtcatcaaaggaaaacactaaaagaaacaggtaaggaccacatcacagagatcctaacaggtcagaataaatctggggatgttgctattttcataaatgttgctgctcccatggtgaatcaattttatgcaaatgaaagtgtttcattttcaatgtacgaaaatctatttcttgatctacgttttgaacctcatctactcttccaaaactcagtgcaatagacccaactgcctgcctgctaggcagcctctcctaaacatcaatacaaccaaagccaatcactacctgttttcccaaaccagctcctccgacagcttcgtatctgctaatggacggatcattcacctaggctttatatctcaaagttatctttcattccttgcctattgtccacctccgttacacacaggctcctcagtccttaaacctccaacctacttatatttttctagagccactgacactatcctgattcaaattagcaccaattcttgttcagattagtagagtaggctagtttccatatctccagttctttcaccattaagtttgtcctacatgatgttatttagatactttcaagaccatcaacaagcggatgatataaaattgtattacctcaagctctgatttcatttcaagctccactcatatatctgcctacttaacatatttatacttagcctcattcgcatctcaaatttaacatgtctaaaattgaactcctgatttctgatcttccctccaaattccacacctactcctcccattcctatctcccaccctcatctcagtgacacgtctacccatccagttgcttcagccagaaacctgggagtcattcttgacactttcctcttcctcaacccccacactcaatctataattaaatgaattctttctttaacatacttctcaaatccatccacttctctccatctcttctgccactaagtcccacctgcagagattcttacttaagtggtatgggtgcagcccaggcaccaggagtagaaaaagttccccaggtgattctaacaaacagctaagagtgagaaccactgctctacaacatttggacttccaccaacctctctgacctcatttctactactttctctcttgttcacttaactccagtcatgctggcctccttgctggttccttgagtatggcaggcacatacatacctcatggtttttgctatttcttttgtctagagtgctagttctctcctgcatcttctacagatatttactcaagcattacctttgatgtgagttagtgaggtcttccctggccattctatctaaaatcacaacacctactcccaccccaacattctctatctatccctttttcgggtcgtatttttctccttgaaacttatcactttccaataaaccatatattttatttatcttgtttgctgcctgaatataagctccatgagagtagggatttttgtctgtttttgtctccagcatttagaatagcatctggcacataactggtacccaattaatatttaatgccccagaaaggccttccctgactcctccacctaaatttaatctccccattattttccttaataatttattctggccaggcgcagtggctcacgcctataatcccagcactttgggaggccgagacaggcggatcacgaggtcaggagatcgaaaccatcctggctaacagggtgaaaccccagctctaataaaaaatacaaaaaaattagccaggtgtggtggtgggtgcctgtagtcccagctactcgggaggctgaggcaggagaatggtgtgaacccgggaggcggagcttgcagtgagctgagattgcgccactgcactccagcctgtgtgacagagcaagactccatctcaaaaaaataaaaaataatttattcctttccttcattacatttacaataatttataactgcattagcttgctgaagttccttttctagactgcaaattccatcagagtggggattttctatgaggctcaccattatacaaactttgcctcacttatatggcacacagtacctactaaaaaaatagttaataaatcagtaacaaaatttgtgaaagcacaccctaatcatgttatttcttcaatcaaaagttttcaatctctcatgctttaccacattaaacccaaactgcttggccatggtcgaaaaccttccaagctctgagcccatttattttccagtcttatcatccattatcccatcttctgcttcagccatgctatgctcttcatcattttcagtacacaccctatactaacactgagcttccccacctccacattttcactcatgacattccttctgcctcaattcccttccccatctctgccaatggaaatccaaccttcaaaatacccacccttcaaagcccagctcaaaggtaaccttcacgaagacagtcctgaatctcaccccagcttccccaaagaactcttcctcttctaagcaccaaacatataatactgctttaatcccccactcattttggaacatacccctccctgtctttctactatgcttttgcttatagtcactcagcaggtatttgttaaaaagaaaagtcagttaacactattcccttcccttctctaccataaaacatatttaaggccgggtgcggtggctcatgcctgtaatcccagcagtttgggaggctgaggcaggcaaatcacctgaagtcgggagttcaagaccagcctgaccaacattgagaaaccccgcctctactaaaagtacaaaattagccgggcattgtggtgcatgcctgtaatcccagctactttggaggctgaggcaggagaatcacttgaactgggaaggcggaggttgcggtgagccgaaatcatgccagtgcactccagcctgggcaacaagagtgaaactccgtctcaaaaaaaaaaaaaaaaaaaaaaatttaaatttttgggggtagggaggtctcttcctctttagagagaccctttaatgaccaaaagatacaaagctagaatggagaattctcagtatgaactttctcttctatgccttttctagaaaggcaggacctgcccaaatgcaatttttaaagctcagatttttgcccccctcagattgtgacagattttcaaaatatattcaagtgcttgaaaaaaatgttaagctgtatgtactactacatgagacaaattccataagcttcattaaaatggtttcccctaagattattatatacttgaaagactatctggctgaaaatccaaacaccataaactctgctgttagaaaatggtaattccaggccaggcgcggtggctcacgcctgtaatcccagcactttgggaggcccaggcgggcagatcacctgaggtcaggagtttgagaccagcctggctgacatggtgaaaccccatctctactaaaaatacaaaaattagccgggcaccaccacatggcaggcgcctgtaatcccagctactcgggaggttgaggcaggacagtcgcttgaacctgggaggcggaggttgcagtgagccaagattgcgccactgcactccagcctgggcgacagggggagactccatctcaaaaaaaaaaaaaagtaaatgataattcctagaaaaacatttctgttcaaaagaaatttgaaactttttatgatctttaaaaatatcccattcgtgttgacattatgttcagtgatgttaagtgactgcactaacgatccggtaaaattccatcaggaaacacctgtacttcaagtattgacctttgtttccccacccacaccctctcttaaggttatggttctcaaagtgtggtcccagtagattcctggaggtccctttcaagtggtctgtgaaggcaacattattttcataacaataccaagaaattgtttgcctttttcattatgttgatatttgtgctgatagtacaagagcaataatgggtaaaactgctggtgccttagcacaggggtccccagccccagggcggcagaccttaccgacccatggcctgttaggaaccaggcgcacaggaggtgagaggtggacgggcgagcaagcattactgcctgagctgtgcctcctgtgagatcagccatggcatgagattctcaaaggagcctcaaccctactgtgaaatgcaaatgggagggatctaggttgcaagctccttatgagaatctaatacctgatgatctgaggtgcagcagtttcatcccaaaaccatcccaactaccaggtagtggaaaaactgtcctccacaaaaccagtccatggggccaaaaaggttggggaccactgctagcatgagctattactcatcagcataagtaatgacatcgaactgtactacagtcattgtcttttgccatcacacaggtgactttaaaaaacaattgcttgcacttaagaatgttcttgatgaagcaataaaaattattaattaaatctaaacccttgagtgtaggtcttttaaatagtctgtaaaaaaactgggaagtatgcataaagcacttctgcaagatactcaagtacaatgggctgtctccaggaaaagcacttgtgactctgagttgtgagttgaactagctgctttttccatggaaccctacttttacttggaacaaagaacaaactggttatttagacatgaatatttagcagacattttcttgaaaatggagtctgtcactttgaggaaaacaagtgacagtatttgttgccaatgataaaaaccaggcttctagagaaaaactagaattctggaaaatctgtagctacttgacagcttcccaatacttatagactttgctgatgaaatgggtggtgatataactaatgtgggtttttgttattgtattataaaatgtttaaacatttagaagatctgcttaactcaattaacaagtatttcccaaaagaccgcagcatgatattctaaaatcacatatgggtaaaagatccattcaagtgcaagtcaggttaatggattttaatgtaacagtaacatcaatatgatttcagatttcatactgcaacttaatttataagaaactaacacttgtcaagttttggtgtagtatcagagaagaatatgcacaattgtctgaaaaggctataaaatacttctcccttttccaactacatgttctttcaggccatattttctttgggtacttcaatcaaaacaaattgtcacatcagactgaatagaagcagatatgaaaatctagctgccttccattaagctggatatttaagagacttgcagaaatgtaaaaaatgcaactcttctcatgaatttttctaaaacattttttcataaaaatatattatgttaacgagaaaggtttattattttatagtaataaatatttttaaatgtcttccattttaatatctaatttggtaaatatcaatttatataacccacataaacaaaagctctttagggtcctcaaaagtttttaacagtgtaaaaactcctgagacgacagtgagaatcactgttctaagaaaaatacgcctgattccagccactcccaaaactgctctgtttgtaccaaaatctcccacttcctcacccgcaactgaagttgaacctggggcaggtatctggcccggaggaaaatcaacctttcaactgaccatatcagatctcccccaggaatctgaattatgcctcatggagactaaagcctatttacagcagaacactagagtccataaactcttgcggaagaccctgctactgttttggttccagccttttctgaggtttggttgttcagcttttccttagattctgcaacagctatttcctttttcctttagataaatctcccctggcttatgtttttttcaaccctgcatgtggcatcagaaactcttttatatgaactggtttgaataggtttcatttccttatgatcaaggaagtcttgacaccataaaacttcgatgcttttacccaaactgttttatttggtatccttatacaagacaccaaattataataaggttcccttccatttgaagatatccctatataaaattactccaacaaaactaaaagttgaatggaaattgtaggctcattcaaaacaagtgatcagttactagataaggaaggtgtaatttttcttttctttaggaaaagtccattatatatcatgtgaatatattttggacaacaaatagcttcattaaaatataccaatttggggcccggcgcagtggcacacacctgtaatcccagcactttgggaggccaaggcgggcggatcatgaggtcaggagatcaagatcatcctggctaacatagtgaaaccccgtctctactaaaaatacaaaaaaattagccaggcgtggtggcaggcgcctgtagtcccagctactcaggaggctgaggcaggagaatggcgtgaacccaggaggcggagcttgcagtgagccgagatcgcaccactgtactccagcctggtgacagaacaagactctgtctcacaaaaaaagcaaaaaaagattatatatatatacagacacacacacacacacacacacacacacacacacacacacacacaccaatctggccaggtgcgatggctcattcctgtaatctcagcactttgggaggctgaggcgggtggatcacctgaggttaggagttcaagaccagcctggccaacatgctgaaaccccatctctaataaaaatacaaaaattagcctggtgtggtggtgcacacctgtagtcccagctactcaggaggctgaggcaggagaattgcctgaacccaggaggcggaggttgcagtgagatagcgccactgcactccagcctaggcaacagggcgagactccatctcaaaaaaaaaaaaaaaaataccagtatgacagaaagtctgaaaaataaagaacaagggagtgagacttgccctatcaaatataaataattattataaagctatgagaattaaggcagtgtagtacaagataggcaaaaagaccaatggtatggaatagagaaaatacagatacaaactctcatatatatggaaacatttaagtggcattagaaaagttgtagggaacagatggactattcaataaaggatgcttggtcactagattatccttatggaaagaaaattggatccatatttcagggttatctttatgaaaaaaaaaagtgatctctacttcacaggaaacatcgaaataaactccaggtggattagagacctaaaggtgaaaagcaaacttttacaacttttagaagaaaatataagatgaaaccattacctccatataggggaggattccttcatgaagacagacacacacacacacacacacacacacacacacacacacacacacacccatataggaacaatataataaatctgattgcatgaaaatctaaaactcaaggccgggcacagtggctcatgtctgtaatcccagtactttgaaaggccgaggcaggcagatcacttgaggtcaggagtttgagtccagtctggccaacaatgtaaaaccacatctctaccaaaaatacaaaaacaagcctggtgtggtggtgggcacctgtaatcccagctacttgagaggctgaggcaggagaatcacttgaacctggcaggcagaggtggcagtgagccaagatcgcaccactgcaactccagcctgggcaacagaataagactccatctcaaaaaaacaaaacaaatctaaaactcagtttgataaaagataaaattaagtttaaaaacaaattaaagggctgggcgtggtggctcacgcctgcaatcccagtactttgggaggccaaggtgggtggatcacctgaggtcaggagttcgagactagcctggccaacatggtgaaacaccatcctagtaaaaacacaaaaattagctgggcatggtggcgcaagcctataatcccagctactcgggaggcagaggcaggagaatcacttgaacctgggaggcagaggttgcaatgagccgagatcatgccattgcatttcagcctaggcgacaagaatgaaacgctgtcttaaaaaaaaaaaaaaaaaaaaaattaaaacacacccattaggatggctactattacaaaaaaaaaatttttttttaacaaaataagtattgccctaaaagggatatccagagccttaaaaaaaaaaaaaaggccaggtacggtggctcacgcctataatctcagcactttggtaggccaaggcgggcggatcacttgaagtaaggagttcgagaccagcccggtcaacatggcgaaacctcgtctctactaaaatacgaaaattagctgggcgtggtggcatgcgcctgtcatctcagccacttgggaggctgaggcaggagaatcgcttgaacctgggaggcagaggctgtagtgcaccaagatcgcaccactgcctaccagcctaggcaatagagtaagactccatctcaacaggaaaaaaagaaaaagtattaggctgcagagaggttagcacttttgtgaactgttggtggcaatataaaatggttcagccactatggaaaacagtatggagtttcctcaaaaaattagaaatagaattacatgatccacaattccacttctgggcatatacccaaaagaactgaaagcagggtctcgaaaagatgtttgtacactcatgttcatatcagcattactcccaatagccgaaaggtaaaaacaacacaagtgtctatcaacagataaagggataaacaaaatatgcaatggaatattattcagccttaaaagaaaggaaatcctagcacatgccacaacatggatgaaccttaaggacactgggctatgcgaaacaagccagtcacaaaatagacaaactctgtataattccacttacaccactcacctagagtagtgaaattcctagagacagaaagtagaagggtggttcccagagcctgggggtgggaggaaacaagaaggtgtttagtgagtacagagtttccgtattgcaagatgaaaaagttctagagatctgttgcataacaatgtgaatatactaaacaccactaactgtatccttaaaaatggttaaggtggtaaatttaatattaagttttttaccacaataaaaagattgtttattatgtgtaataataaaaaactcaaaataccttatgtgtattaaacagaaaatggataaaccgtggtacagcatattcatacaaccaaatactaaacagcagttaaaatgaactcaagttacatgtatcaacataaatatatctcaaaaaaacatactaagcaaaaatattaaggtaaagaatggtattgactggagtatatagtacatattggattatagcacagttagaacataataaacaccaaatgcaagataggtgttacctctaaggagggagggaagaagaaaataggagtacactaaggctttgctatttcagtaatgttttattcactagaaaaagtatctgggggcaaatataataaaatgttaagattttataaagctgggtgataagtatatgcatggtattattctttatatttttctatatgtttaagatatacatatatacacacatatatattgacatatatatagacatatatacactcatatatatacatatcttttttttttttttttgagacggagtctctcactcttgtcacccagactggagtgcaatggcacgatctcggctcactgcaagctccacctcccaggttcccgccattctcctgcctcagcctcccgagtagctgggactacaggcgcccgccaccatgcccagctaattttttgtatttttagtagagacggggtttcaccgcgttagccagggtggtatcgatctcctgacctcgtgatccgcccatctcggcctcccaaagtgctgggattacaggcgcgagccaccgcgcccggccttttttttttgagatgagtcttgctctgtcgcccaggcgggagtgcagtggtgcgatctcagctcactgcaacctccgcctcccaggttcaagtgattctcctgcctcagcctctcaagtagctgggaatacaggcgcccgccatcatgcccggataatttttgcatttttagtagagacagggtttcactatgttggccaggctggtcttgaactcccgacctcaggtgatccacccgtctcagcctcccaaagtcctgggattacaggcgtgagccaccacgcccagcctaagatatttttataattaaaaaattaaagaaacacccaagaatgatcaataaaaaataaattaaaaaaaaaaaaaagcaagttgtagtacggaatattaaaaaaaaaaaaaaattaagaccaggcatggtggctcatgcctgtaatcccaggactttgggaggctgaggtgggcggatcacaaggtcaggagatcgagaccatcctggccaacatggtgaaatcccgtctctactaaaaatacaaaaattagctgggcgtggtgatgtgcgcctgtagtcccagctactcgggaggcttaggtaagagaatggcttggacccgggaggcggaggttgcagtgagccgagatcgcaccactgtactccagcctgatgacagagcaagactctgcctcaaaaaaaaaaaaaaaaaaaaattaagacagcataaaagatgttcactgaaaaactgtcatttttatttacagaaaatttctacatggttatctgtttccaaatatcaagtaaaggaatatataaatctcaatttgaggagatgaatgatcacacatacatttttcctcttacaaataaatagatatatagatggggagattagaggctttcaaagaactactgacatggcaaggagatttacactaacagctttttagaaaatcaaaagtcaagaataaaggtctccatggtcaagaaggtgttgctgtctgaatggttaattccctaaggtctatatccagctctcccaaagctgcatgaccagctctgtcatagagtacctaggcaactccttgccagttctattaaaacatgatcataattggaagaatgacagcccaagcatttcctcaagaatgtgtactttagaatttctttttcctgtaatgggagcttttcaaaaacaaaaataaaagcagctactaggtcttattggcaaatgtgtcagaatagcctttcggagagattcactatgcctgaaaacaaacacaagaaacaggtgtgcttccctgaatatacaaccaggatttaatttgggaccagtattgttatgaaaccaggttgagaataaccttgtaaatatgacaaaatggtaaaaagaaactgaaatatgaatttcagataaatatcagaatactgttattatctggctttgagtaacctgaaatcagtaagattactcaaataccactacattgtaggagtctaacaaaacattttttgctaagataggaattagtccactccgaaacccactttagaatgcagttctgctgtatctttcatttgtattaacctttattagtgtgatgaattttcagaaaacattgtggctgccctgacttttctcctgagtctacagtacatgacagaaagccacaggattcagcactgttccagaccctgagttaagacagctagatatcagagtttacggcctatctgaaatttttccctaattaagaacaatttgcctcacttctttatgatgaaaatctagtaataaaaaaaatatgcgattacagcataatcttacataacactgtgtagagatgaggaaaagggaagacatacttgtgcatagacgcacagatgtttttatataataataaaaccgccacatcccaaagcttagaaacacacaatttcaacttctaaattttattctgtgtgcctttcatcttagaaaaaaacaagtttgctcatgagaggtggggacaacggggtggtcaatgctctcttcagagatactgcctttcacgaagaatattcaagacaaggaagctgtgagttctaacatccagaatccagcaatgccagtgacacagaagcgagtcaaacactaggtacatcaagttaaaattaaagcacctttagtttttagaatttggttccagaagctccatatggtagacaaataacctgttagaggttggtgcaaaagtaattgaggtttttaccattaaatgacaaaaccgcaattacttttgcaccaacctcataatttactgaaagggaagaaaatgtcatatacataaaggttaagggtaagggttctgcatctaggacgggaaaaatacaaagtgagctaggaacttcttgtgacagaaagcaaggaagcactcatagctcaagcttaaagggctcccacaggccaaatacaggacagtgtgagcatcaaaaagaaggtaatgttggtaaaacagaataaactaaaatccatgacactaaaacaatgagagtgaaaaaaactcatttaccaccattagagatgatattgtaccatttccttactcagaaaagtgttaaagaaaaaaaattaagaatttacctcaattttttagtagaaattataatttaggccaggcacagtggctcatgcctgtaatcccaggactttgggaagcagaggcgggaggatcacttgaggtcaggagtttgaggccagcctggccaatatggtgaaaccccatttctattcaaaacacaaaaattggctgggcagggtggctcacgcctgtaatcgcagcactttgggaggccgaggcaggtggatcacaaggtcaggagatcgagaccatcctggctaacacggtgaaaccccatctctactaaaaatacaaaaaattagccgagcgttgtggtgggcacctgtaatcccagctaattggaaggttgaggcacaagaatcacttgaatccaggaggcagaggttgcagtgagccaagatcgctccactgcactccagcctgggagacagagcaagactccatctcaaaaaaaaaattataatttattcctaaccgatgaggaaaatccttacagaagattgaaagcaaatcagtgtaaaagaaatgacagaatcagaaaaatcactatttccaaaaaccaatgaattaactgatttaggcaaagatcattatcatgaggtgaaatgttgctggagaagtgtaacagtacaatgccaaagtagcaccactccacagataacttactaattacaaagggggaaaattgtctttacaacaaatgagtctggtatttaccaccttaaatgatcaaacaaactcagcatcattaatagtgggacattatgacattgtgtttctcctactatgatgcagcgaggagcaaagaaacacgtacaaagtagtctcatcaaaaatgtttaatgataatctaatcagacctttagagctcaatatctgtttatgaaactatgaagaaataaccagaaaatcccataagtgatatattctacaagacaaacagctcgggctctttaaaaaccagtatcatgaggccaggtatggtggctcacgcttgtaatcccagcactttgggaggccgacgcaggccaatcacttgagttcaggagttcgagactggcctagccaacatggtgaaaccccgtctctactaaaaatgcaaaaattagccaggtgtggtggtgggcacctataatcccagctcctcagaagactaaggcaggagaatggcttgaaccctggacgcaaaggttgcagtgagccaagatcatgccactgcactccagcctaggcgacagagtgaaactccatctcgaaaaaaaaacaaaaaacagtatcatgtggcttctaaattgttctagatttaaagagactaaagagatatatttggaggaaaaaaagaagtgtcatcttcaagacaattgggaaaatctgaacacgaactggatattagatggtattagagaattactgttaattgccttaactgtgacaatattataagctttaaggagatacagctgaagtatttaagggtaaagtgtcatgatgtttgcaatacaaaaatttatatatttaaatatatatgcacggctgggcacggtggctcacgcctgtaatcccagcactttgggaggccaaggtgggtggatcacgaggtcaggagatcaagaccatcctggctaacatggtgaaacaccatctctactaaaaaatacaaaaaattagccgggcgtggtggcgggcgcctgtagtcccagctacttgggaggctgaggcaggagaatggcatgaacccaggaggcggagcttgcagtgagccaagatcgcgccactgcactccagcctgggtgacagagcaagactctgtctcagaaaaaataaaataaaataaaataaatatgcatatacataaagtaaatatagcaaaatgtgaacaactgttgaatctaagtgatggatataaaggtgataattgtactattttttccatttttctgtatgtttaaaatttttcacttaaaccattatacgaaaaaagaaaaaggctccaaatgcacttcctccaggaaggcctcccaaatgaactctcctctaacccttaatcatgtcttcacaaggtcctctcagcatggaacacagtgtattactgttccagttctgttttctaattgttctcttattatttcctatattcagtaggtgtggctttacaacaagattacatctttgggccgggcgtggtggctcaggcctgtaatcccagcactttgggaggccaaggcaggcagatcatctgaggtcaggaattcgagaccagcctaaccaacatggagaaatcccgtctctactaaaaatacaaaattagccgggcgtggtgttgcatgcctgtaatcccagctactcaggaaggctgaggcaggagaatagcttgaaccagggaggcagaggttgcggtgagtcgagattgcaccactgcactccagcctgggcaacagccgtgaaacttggtctcaaaaaaaaataaataaataaataaaaagattacatctttggttttggtatcagggtaaggctggcctcatagaatgagtttaagaagtattcccttctcttcaactttttagaatagtttgagtagaattgctattagttcttctttaaatgtttggtagaaatcagcaatgaagctatcaggtcctgggctttttctttgatgggagactttttattattgcttcaatctcgttactcactattattgatctgttcaggttttctatttcttcatggttcaatcttggtagactacatgtgtccagaaagttatccatttcttctaggttttccaacaagactgtaagctctcttcaggcacagacatatttaattattttctatttatttgaagctcatagtgaagtattctgctatcagcagacttaaaaaatgctagtaccagtattctgtaccaagagagcagacctcaactaactagattagcttttcaatttctcaccagaataacagcagtttacttggataaacaatttaaagtcagagctatcaaaaggagatcataaatcatttacaggtttacagaatactaacagagaaactagcatctaagagttaaaggaagaaattggaatataggttttttatgtcttcctagcattgtcatggatttgctattatccagacatatgactttattctcatgacattatttttcaaacaaaatcctccatgacccctccccaatctgcaaaacagtgaggtatttatacacaactcttcagtgaaatgaagcttaacaaactacataatgagctttaaaatcttagataaaagactgcacaaatgatcaaaaattttgataatagtgttggtgagaaaacaggcagactcacactgctggcaggaatataaattcatacaacctctgtggaaagcatttagtaatacctaacaacattacaaatgcacatccattgatccagcgcttccactaggaatttaaaccaacagacacccatgtacacagaataagtacatacaaggaattaattgtatcactggaaacaacctaaatgtccaataagtgttggctgaatgatggtacatctacacaatggaattatctgccatctttcaaaaaggaagagggactgtatttactacatggaatgatcaccaagataaataaagtgagaaaagcaaagtgcagaatgagcatagtgtcttattgtgtaaaacaaacaaaaacaaaaaatgtgaagaatatataggtgtatatgcttgtaaaaggatatactgtctcgggatgaataaacaagactgttgcctttgggaaggggaactcatggataaaaagaggatggtaagaaaagaaagacttcactctctgtgtaccttttgaattttgtttcatatgtatgtacatgtgttaacccattttaaacaatgattttttaaaaaaggctctgcaccagtacgaattatttaacaatattcgtcttaatctaaaagcattgcacgccatcaaaattttaaatgaggcttcagtgaattcaactagacaaaatgtttctagaaaaaatcaggccgggcacagtggctcgcacctgtaatcccagcactttgggaggccaaggcgggggtggatcacttgaggtcaggagttcgagaccagcttggccaacatggcaaaacctcaactctacaaaaaatacaaattagccaggcatggtggcactcacctgtaatcccagctactcgggaggctgaggcagaagaatcgcttgaacccaggaggcaaaggtggcagtgagctgagatcgcgccactgcactccagcctgggtgacagagcaagactcgatctcaaaaaaaaaaggaaaaaagaaaaaatctaagcatcccaatggccgaaacctactgagaagacggacacttactacaatagtttcacttctagatactacctaagtaatatctaagtatggacataggaaacagtaaacatctccaaataccaaactagctactatgaagagctctaaaacgagaaatcaataaagtactaaatggataacaactaccccaaacctaagggtggggtagtcttacaataacttctacctctaaggaaaaaaaggtgagtttccagctctttcccaggaagatatatgcaccccaaatttctctgttccctgtgtgtcatctcttggttctaactgtaaccatggcaacaggaaacagcacaaaagacagcagaaccctgtaagggccagggttaaaaggggaagtgaaaaatacatatactttaaggcccaagaacatgcggttttggagttaacagtggcagccaaaaaagccttgagagaagaacatcaaagaatacaaactaaagagaattgaaagtaaggcttactaatagttcccttcccagttatccagctaggagacgggattggcaaggagaactgaaaaacacaaaaaatgcccctcctctcgcactcccttccccacaacaatttagctattcatttcaatgttatctagaaaatcttttgctattaagattttatcttttcttcactctgttttgatggcagaggtaagcagcagcaaagtatccaaaaaaagggccacatataatcgctaactgaaaacccaggtcctagatcactgaaatactattgtacttcaaagttcgttatttacatttctttttgttatctgccaacgtgaaagaaacatcacattacttaaaacctccactgaataagttattgtccaccaacagtttcagattgctttccgatttgttttcatgttacagagcaccaataaggtacagataaaatgaaaagtgctaaggaagatctttgaccaaaaaaaaggcaaataggtcacacaaagtaagaaggccggtgccctttatctctcttatctagttctgcgaattaagaattttactaaaatgaaatgcctcacttagttccatttatgacccttagtcttctttagcaaggcttccaaaatcccctgccagaataagtgatgggatggagcacccactcctaaatttagggtaagttggtactaaaaggtacaagcacaacgatgggagtataggaatggaaaagtaatcctagaactagaagatacagtgacagtttcaaaagaagggtcagtgtgggacacgctggctctgcgaggcgtttgtagcctgggagtctctagggcaacaccagatgagaatagtgctttgtccgttaagtctttcacataatttaaattctcccctttggacaggagcaacaggctcattatctggcagcaagtctagcccacagcctgggaagaaggcggactcgtgctccaccggctctttatcccgcaggtccctgcaacaccgcgatgcgcatgcgcccccggggcagcgaagaagcagcccgagcgcgttcacactcgcgcatgcgcagtcacccatctcgccgcaggcgacagctcagtatttggcaagggggatggggctgggaaatgatgggggggctgaaggcagggggcgcgtttgtgtcttctgaatgcttgagatagggagaagggacggctgattcggctctggcattcgcaggccacgtaatccgggtgtaggaaatgggactgaggagagtatatgtgtgtggcggggggtggggggacagtgggggtcagtcacctcttcagggaggtgccccccccccactccgacaggacaaccccctccctcgactctcctccccccactcacctgagagcggcggcgacagctgctggtccccgtccccctgcgcttgcctcatactgtccgcaacatccgggacctgcgggaccgccgatacacaaatacacacacactcggagcgcgcacactcacacacacacatacacaccgacacacaccagccggggcgtcatggcgtcagcacgtcgacgcagccagcgcgtaccgccagaccccaccccgcgcggcctcctccccattactcccttctcctcccctcccctccctgggtttccctgctcctcctccctcaagactccgcctatctttcctagtgcgcatgcgtctcggggccaagtcagggcccggggatttgagaggaaggaggggcctgagtaaaaagaggcgggaacttggagggggtcgcgcgcagggcgcgggagcccgctgcgaggtgcgaggaccaaatagaggcgtaacaagccaagggtcggagtgggcaacggaacagttaaaggcatttcacaacagcgatttaggtctgcaagcagtttatggagtaccaacgactcttatatgtattaactcattttttaaaagccagccctgtcagtaaaatattttttggactttatgatgatgctagagacccttttaggtaacttttaaaatttagcacttgtaaacaaaaacaaggactatcctttcaggggaaggcaggagatataggtgatctaactaaaaggaagctgaccacgcatggtggctgacgcctgtaatcccagcactttgggaggctggggtgggcggatcacctgaagtcaggagttcgagaccagcctggccaacatggcgaaaccctatctctactaaaaatataaaaattagctgggcgtggctgggtgcggtgactcacgcctgtaatcccagcactttgggaggccaaggcgggtggatcacgaggtcaggagatcgagaccacggtgaaaccccgtctctactaaaaatacaaaaaattagccgggcgcagtggcgggcgcctgtagtcccagctactccggaggctgaggcagaagaatggcgggaacccgggaggcggagcttgcagtgagccgagatcgcgccactgcactccagcctaggcgacagagactccgtctcaaaaaaaaaaaaaaaaaaaaaaaaaaaattagccaggcgtggtggcacgcgtctgtaatcccagctactccggagactgaggcaggaaaattgcttgaacctgggagacggagatgaccagagatcgcgccactgcactccagcctggatggcagagcaagactacgtctcaaaaaaaataataaaataaaataaataaaaataaaaggggccggcgcggtggctcacgcctgtaatctcagcactttgggaggccgaggcgggtgggtcacgaggtcaggagatcgagaccatcctggctaacacggtgaaaccctgtctctactaaaaatacaaaaaattagccgggtgtggtggcgggcgcctgtagtcccagctactcaggaggctgaggcaggagaatggcgtggacccgggaggctgagcttacaatgagccaagatcacaccactgcactccagcctgggcgacagagcgagactccatctcaataaaaataaataaataaataaataaataaataaaggaaggaaggaaggaagctaattcagtgacaatttgttgtcttggacacctgagttccctgtcagcttcacattttagctccaatgggccataagtgattcctgagttgagtgaaagaaaagggctcggatcaccttggcccttagagaaaaaaagttgtctcggtgttacagtaataatgttagtgttgggtattagttgttatgattctttcctttagctcaaattttaaaaatttttaaaaattattcttgggctgggcacagtggctcatgcctgtaatcccaacactttgggaggctgaggtgggaggatcgcttgagcccaggagttggaaaccagcctgggcaacaaagcaagactccgttctacaaaaaaattagccaagtgtggtggtacctgcctgtagtcccagctactcaggaggctgaagcaggaggatcccttgagcccaggactttaaggttacagtgaactgattgtgccactgcactccaaagtgggcgacagagtaataccttgtcttaaaaaaaaattattatgacgttgtgtctgtaatcccagtactttgggaggctagggtaggaggatcacatcacttgagctcaggagttcaagactgcagtcagccatgatcacgccactgtgctccagcctgagcaacaaagtgacatcctgtctctaaaaaaaaaaaaagaaagaaagaaaaaagtttttaatatatgttcttactgaacgcctctttcgtgctggaatggtatcattacacatacacacacacacacacacacgcacatagcattggacacgagagcaacccaatgaacctgtagattgggaggtgacacagtgtgggccctgctttgggaacagcttccaggagccctgctgtctcccaggcctatgtgactgtctctaggagacagtgctcagtgtctcctgccacacgcgtcctggtgccaggtggctggtgagtctgttcagccaggaaggctgggagcccatgagcaaaaccccaggggtttgaaaaaaaaaaaaagcccctgacagtgccaggctgtcttccactttcaaatacagaagcaagtcctataatctcacagtttaaaatttcctaggaatcacggacaaaacactccagactcctagagtttacacaaccgatttttcagccagaatgatcaagaaatgtagatcctaaattctacaatgatgtggtgactgtacctgccccactgcaaaacaaaaagagcctttgtcacctattaggcagaggcttgaaactttccaattagatttcacttatcaggtggctcacacttgtaatcccagcactttgggaggccaaggcgggcgaatcacttgcggtcaggagttcgagaccaggctggccaacatggtaaaatccccgtctctactaaaaatacaaaaattagcctgacatggtggcacacacctgtaatcccagctactcaggaggctgagataggagaatcgcttgaacctgggaggcagaggttgcagtaagccaagatcaagccactgcactccagcctggacgacatagcgagactctgtctcaaaaaaaaaaaaagagatttaacttatcattgttatcaacaaacatgattcctttagctgaagccagcaaagtttttggtcctgaaaattcggaatgccccagaaataatccagtaaccagtaacaagtaactggttcctggtgtcactgaggttgctcaattacctattctcttgacttcagagttcacacaaaagcagggaaaaaagaaaaggggtactctttgcaggaaggagcatgaaaatcgggaacagggtgcaggaaaaggaaactggatgcatggacaacctactgtagctccctcacatttggagctaatcgtaacagcttcgccagactctacccaggacctggaaggggactccttggggaaagtgagtctgtgccaacagcttgtccaggctgggcccgaatccccagtgatctggaagggtatgagaggtcttatccccatctgtagcctggtgcaatgaagctcctattatactgtggggaccatacctcccacctgagatgtgatcctatcagcctctgtacaaaggactttgatttggtgtggagctgattaaacgattgtagatgtccttggaagcactgtgtggaagaattttaaacagcttctcctttttaatatgcacttcctcttcggttttaattattttgttcctacattttccctttcaatttactaaaatctagaaatgtaattagagcagaggctgggctcagagaaagctgccaggatttctacagcatgattaaatataccaggcatccctttagtgtgggactgaaaaataggattctcattattatctttcccttatccaggaaagaatccgcaccacatacagatacggatttattgaacatgcagcactaattaaaaactcacccagcctcttgacgaggtttgggtaaagaaaaaaaaagtgcagttatttaattttttcctccattaaatgttttgttgctgtaatgacaacaagcaagaagcgcttcttgttcttctttcctcaaaataaaattcttgtctcctcctgagggacttaatgaggcttttatctatgcaacaacaatcaagcttacaatggcaccaattcagttcactgctccttgtgatggtaagcaacaagcagaactcattttcttaatccgaaacacagacaacaaagtgttcattggctgttatgagccaggtctgggtgcgggatcttccccaaaggctctgagatgccaacgaggatcttcggctccattttacagtccagcaagcaaaggtgtggtttcccttgaagctctaggggaggtggaggcaggcaggactgaatagaaaatgagtacagactcccattttggttgtaagtgctgtaagaagctgaagtctttctctcctcactggacagctcttccgttgagtggtcaatgatcaacttttcagttgggcagttggtccccgggcccagcgtctcctttggtggagcccttcatggacattagagatgaatatacaggaaggaagatctttagtaggggcagagtcctgtgttccagaggtacccgcctaaaggaaaagagacaaatgtcataccccaggacacaggtgtaagaacatgcacaaagaaacaagaataacacatttatgatgttgcactggggcctctatggggctcacaaatattagcagtggagacattttcattgattcatgaaattgcatagtgaggcatctgtggcttaatgaaagggctccagcccccttgtctggagactcaagttcaaacccagcactaacacttactacaatataaagttggacaaacctctctaaggctcagtttttccattggaacaataagcaaaataatgcccaccttatcatatactatgtgaggatgaactgaaataatattttgttgttgttttgagtcttgctctgttgcccaggctggagtgcagtggtgcaatctcggctcactgccacctcgggctcccaggttccagcatttctcctgcctcagcctgcccagtagctgggactaaaggcacccgctaccatacctggctagttttttttttttttttttgagacggagtacccaggctggagtggagtggcacaatctcagctcactgcaagctccgcctcctgggtgcatcccattcttctgcctcagcctccggagtagctgggactacaggtgcccgccaccacgcctggctaattttttgtatttttagtagagacggggtttcaccgtgttagccaggatggtctcgatctcctgacctcgtgatccgcctgcctcagcctcccaaagtgctgggattacaggcgtgagccaccgtgcccggccttttttttttttagtagagatggggtttcaccatgtcagtcaggctggtctcgaactcctgacctcaggtgatctgcctgccttggcctcccagagtgctgggattacaggcatgaaccactgtgcctggttgaaatagtatttgaacacagcacagtctctggcatacagtagactcaacttatttatgaatgtgtcactgaatgtggatgttttggagtaagtgttcacatacctgctagccttcaagtcccactcttatctgtgcactgtgtcactccttgcctccgtgcccttcttcagaattctttggggagtgtggaatcaagaaaacagcacagatttctcagccagaacaccgttacttgctagctgtggcccctgcacaagctctttgacctcagaacctgtttcctcaaacatcagccagagttcccagttgcaagaactgcatcaactctggctacatcaatcagaactggaattgactgaagaaatattgctggctccgagaattaacaggagctaaagagtccaacttggaaattcagctggaaaccaatggctggtggaggaaggacaaccaccttcttcagcaggacagtctggagaggaggcccagctgctgggcactgccacaatgtgccaccagcagacacatcaccactgctgctgctgctgctgctgctgctgcaaaggatgtctaatcttctcttcatctgcgtctcatgctgcaaacccacagctccaggtggaagtatccggttggccaatcctagtccacctcttgggccctaactaccatggtgggtaacaaggaaaggtctccctgccatggtgtccatggtgtgatatgtgaccctcctcactgatgcgatccacagcagaggacacatcccaaacaggaagcagatcagatgctggacctctaggcccccaacccatcagtgaaatggggcattccatcatagggtaataaacagcattggatgacatatttgttcaaaagggcttgacatacaaaaggattcctttactttacttccctctttaataaaacaaaagggagctgggctgtggtttgtgcctgtagttccagctacttggaaggttgaggcacaggaggattgcttgagcccaggagttggacgctgcaataagctgtgactgcaacactgcactctagcctggttgacagactgagactccaactcataaaataaagtaaaataaaatgacaaaacagctgggcacagtgtctcatgcctgtaattccagcaccttgggaggccaaggcaggaggttcacttgagcccagcagtttgagaccagcctgagaaacatagcaaaacgctgtttctacagaaaaatacaaaaattagccgggcatggtgggtacctgtaatcccagctactcaggagactgaggtgggaggatcacttgagactgggaagtcgaggctgtagtgagttgagattgtgctactgtggcgacagagccagacactgtctcaaaaaaaaaaaacccaaaaaacaaacaaacaaacaaaaaacagcttggaatggtgtacttatctgaggacttgatcaatatatgtttacagacatagaagttctgaggttttaacctgggaaatggcaggaatacatgatatctatagggtggcactccaggcaaagaagaaacaataagaaaaaagaaagaaaaggaaatggcaggtttgagcctatttttcttttatttttgtcttggactagcaacacaactccatctccatctcattcatctttaaaacgggtctaaaagttatctgaagtcattacttcaaaataagttttagaaggttaatatttgttttcaacaaagaatatattatcaaaagtagattttattcactgtcatgaattatttccggtgggttttttaggatttcccaatcctattctgaatgggattgatctaccatctgttggcatttgcccgaaaataacatttacctaaatgtagataattagtttagcaaaaacaaatttttttctacatcaactcaaataagaattactttggattttactgttttagattatccttgccatggctctactttatcaaggtgaattgatttcaattgaaagtttactctacattagaatcttatttttaaaaaaagaatttaatctaaaattcaattatggaagatctgtgccaaagtgaaaagtcaactgaatgctccccaggtacagagctctaccagggtactacagggtgagtcaaaagaaatagaaatattgtccctattcacagacttttcaagttagaataaaagaattttataacttaaagggaccttaaagcttctccaacccagtggttttcaaactgtgcttgcttcccaagctccgggcttctgaagacttgcctcaggggctccaaggaagtttgggagggagggacctgatggggccaggacaggccaagccaagcaaacctggttgtctttttcacccattcagttcagaaagtagccatcattgaccaggtacagtgtctcacacctgtaatgctagcattttggaaggctgaggcagtctggtcacttgaggccaggagttcgagaccagcctggccaagatggcgtaaccccatctctatttaaaaaggtacaaaaaaattaggggggcgtggtggcgcatgcctgtaatcgcagctactagggaggatgaggcaggagaatcatttgaaccagggaggtgaaggttgaagtgagccaagattgcgccactgcactccagtctgggcaacagagtaaggctccatctcaaaaaaaaaaaaaaaaaaaaagaaagaaaaagaaaaaaagaggcccggcatagcggctcacgcctgtaattccagcactttgggaggccaaggcaggcagatcccaaggtcaggagatcgagaccatcctggctaacacagtgaaacctcgtctctactaaaaatacaaaaaattaaaaattagctgggcgtggtggcgggcgcctgtagtcccagctacttggcaggctgaggcaggagaatggcgtgaacctgggaggtggagcttgcagcgagccgagatcgcgccactgcactccagcctgggcgacagagtgagactccgtctcaaaaaaaaaaagaaagaaagaaattagccagtatccttggccttggctcctctagtcccgaagtctcacacctaatccatcaggaattcctgttaagttctagtttcaaagtgtctcctgaatccatccacttgtctacttctcttctgtcccaccgaagttctagccaccatcctcttttgcctggaccatagaaagagggtcctgaatagtcttcctaattctctgcttgtctctcaatccatgcttcactcagcaatcagggcaatctaattaaaatttaagtcagaccacattgcaatctggcttaaaacctttgaatggctttttgttgtaccaagaataaaatccaaactttgtatcaccaagtaacagagcctcatcttcaatcacatctcatgttgcatcttttcctgtccttgctccagcaaccctggccatctacagattcctagaaacccatcaagctctttccctccccaggcctttgtggctactattgtctctgactagaatactttttgcctggttctgtctcttcttcaggtttcagcttaattgttatatccttctctgacctcccaccatatccaaaataagaactttctgttattttctatcatggtactttgtttacttcctttacaataccgccaacaatttgtaactgtttttgtgaatttactctttcattatctgtctcccctactggattgtcagctccatggggacagtgacctggctggctggctctccgttatgtcccagcatccagcatagtttgagaccagcctgggcaacatagcaaaatcctgtctctacagaaaaagacaaaaattagctgggcgtgggtgggcacctgtagtcccagttacttgggaggctgaggtggaaggatcatttgagactgggaagttgaggctgcagtgagctgagatcctgccactggggcaacagagccagactctgtctccaaaaaaaaaaaaaaaaaaaaaaaaaaagtcttgcggccagatgcagtggctcacgcctgtaatcctagcattttgggaggccgaggcgggtggatcacctgaggtcaggagtaagagaccagcctgaccaacatggtgaaacccctctctacttaatacaaaaaattagccgggcatggtggtgcattcctgtagtcccagctttacttgggaggctgaggctggagaatcgcttgaacccgggaggcagaggttgcagtgagctgagattgcgccatcgcactccagagcctgggcaacaagaacgaaactctgtctcaaaaaaaaaaaaaaaaaaggcatggaatggagtacttatctgaggacttgatcaatatgtttacagacatagaagttctgaggtcttaacctggggaatggctgggatacacggtatctatagggtggcactccaggcaaagaagaagcaataacaaaaaagaaaggaaaggaaatggcatgcagcacatgctgacatgtggacaggaagtgctctgtacttacttacttactgaataaacatataacaggaagccttagccttgcctggaatgtcacagaagacgcaagcaaaagttggaggcataaatggaaggctgataggtaatgtgggtgaaggggaattggggaaaaaccgtccaggcaggcagagaatctaaggccagggagggcttgaagttttttagaaactccacgaagattagtgtggttgggccaggtgcagtggctcaagcctgtaatccaagagcttctggaggctggagcgggagggtttcttgagaccagaagttcaagatcagcctgggcaacatagtgagactccactctacaaaaaaaattaaaaattaccagggtgtgttggcacgtgcctgtagtcctagctacttgggaggctgaggtgggaggattgcttgagcccgggagattgaggctgcagtgaactgtgattacaccactgcactccagcctgggcctcagagtgagagcctgtctcaaataataataataattaattaactaattaattcatgtggttggaggatagagagcgagcaagagggccgtgtgaggtgggtcaggagggcaaggcagagccagcctttctcccctggaatccaaaccacaggacctgagagtaggggaggaatgaacttccccaaagcacagtcagggtgctctgggtggggaaagagggaaatgaatgcaggggacaacaatgcaagaccactactcttggttttcctctgccttctccggctgctccttctctgtgtcctttacaagctctttttttagcaatcctttgaaaatctgctttcctcggattccattcacttcctctcctcttcacactgtcttcactttccttgagatctctcattcactctcacagctcccctgccatccatctgccagagaatattcccagtccgtcttgagccaggctttcctcttgagccccagacttacctacccaactaccaacctgatagcttcggtcagatgtcccatgggcacctaatatccagcagatctaacacctggctttcctctagtatctcaccaagctgctcatgcctgaaaactggggagtagccttgattcctccagccctcatccaattaataaccaaattctgacatttcatagtttagttaatctctcaattctgcctacttccttccatctccactgacatttccccaattctttcctggatcacaacggcctcctcagcagcctcccagcctctgattatcccccctccagttcattctccaccctgcagccagagtgagctctctaaaataacaatctggctgggcgcggtggttcaagcctgtaatcccagcactttgggaggccgaggcagcagatcacctgaggtcaggagttcgagaccagcctggccaacatggtgaaaccctgtctccactaaaaatacaaaaattagctgggcgtggtggcgcggcctgtaatcccaggtactcgggaggctgaggcacaagaatcacttgaacccgggaggtggagattgcagtgagccgagattgcagtgagccaagattgcatcactgcactccagcctgggtgacggagcgagactctgtctcaaaataaataaataggccgggcgcggtggctcatgcctgtaaccccaatactttgggaggctgaagcgggtagatcacctgaggtcgggagttcgagaccagcctgactaacatggagaaatcccgtctctattaaaaatacaaaaattagctgggcatggtggcgcatgtctgtattcccagctactgaggaggctgaggcaggaaaaccacttgaactggggaggcggaggttgcagtaagccaagaccgagccactgccctccagccagggcaacaggagcaaaactccgtctcaaaataaacaaataaataaaaataaataaaataaaatgccaatctgataaagtcactttgcatataacccttcattggctcccactgccatcaggaaaataaaatccaaactccttaacaggggtgaaaggctctctaaaagtgacctgtgcttttaactctaggtgccctcttaccctccccaccccacttagcaatatatttccagtcgtacacagatctactttcaattccctgagtgaaccaagttctctgtttttgcacatgctgttccctcttcccagaacagtcttctttgtgtctttccctgcccccacccccttccccctgttaatttcctgctgattcttcaggcttcggcttatccatctgttcctccaggaagctgtgcaagtgtctcacagccctgagccaggttttcctaaaattcttcttccactgcatgtcaccctggattgtgggtgcctgagtccttccctctgctcattactaaattgtaagctctttggggacttattctttttattttattatttatttatttattttttttgagatggagtctctctctgttgcccaggctggagtgcagtggcacgaactcggctcactgcaacctccgcctcctgggttcgagcggttctcctgcctcagcctcccgagaagccaggattacaggcgcccaccaccacgcctggctaattgttgtatttttagtggagacagggtttcaccatgttggcgaggctggtcttgaactcctgacctcaggtgatccacccgccttggcctcccatagtgctgggattacaggtgtgagccaccacgcccggcctctttttctctattgtatttctggcaccaagcagcattcctagcacatcacaggtattcagataagtacttgtggaatgaatacatgaatgaatgagtgaaataaacattcctctcaggaacttagttccaggagcattaggcacagaagcctccagagccttcctcttcttgcatccattatttggcctcaggctggtcggtgggctggctggtcagaggcccgtgacaaccctgaatacccatccaagaggttccttgactcagaccttccgttgggagcccagtcttcccttaaaaggccaccttatcggaaagtgcctgtgaaggcatttatgagctctatttttatccatgttggaaagcctcaaagtcaattcccaagccaaagacattacactcagcaacgccgacgagcaaggaagcatctctgcgatgcctttgagtcacagctttgttttctgtggcaagggcctcagttcctccccataactgggcccttgtttttaaggactgactctgaaaagcttttgatctcacatttgtgaaaactagatcttgcagctcttaatggtctgtgcaatggtgtcaccttccctacgatttcttaactctgccaggcagggcagagcagagtggattgccaaacatctcccagtttattgaaactggcttcccatccccatctccaaatggaaattcatcttggatgatggaaggaaggaggcagggtggtcagaggggagggctcccaaggagcctggtcagggagataattggacagaagctacaaggctgaggagagtaacacagcagggctggtgagcaagttgagagcctttgtcagggaaaggattcactgtcagcactgcagacagcaagagcgggagagagagagcgccaaagggaggagtgtgaagagaggaaaaagacagtgaaagaccagaggaagggaggatagtgggaggaaagcaggaagctgcaggatgtaaggatcactggtagtttacggagagggagcatgcatcctccccttaatccaagtcaggtaaattggggagagagggcgttagagagtcagacggaagccccagagagatggtcagtcacaccctcagatgtgactagaaatccggatgtcggtgttagaaatgagagtcggggaagataggaaggaatgttctcactcccaaattccaggcacagactttgccatcattcctgttcctggggatttaggaaagatagggtttttgttttgttttgttttgctgttttagaggaaggctctcgctctgtcacccaggctggagtgtggtggcaagagcatagcacctggacccccctttcaagtgatcctcccacttcagcctcctaagtagataggactacaggcatgtgccaccacgcctggttaaagataggttttgtcggctgggcatggtggctcatgcctataatcccagcactttgggaggccgaggcagatggatcaggaggtcaggagatcgagaccatcctggcccacgtggtgaaaccctgtctctactaaaaatacagaaatcagctgggtgtggtgacgaatggctgtaatcccagctactcaggaggctgaggcaggagaatcgcttgaaccagggagtccgaggttgcagtgatccaagatggtgccactgcactccagcctggcaacagagcaagacaccatctaaaaaaaaaaaaaaaaaaaaaaaaaaaaaaaaaaaaaaagataggttttgtcaaagagtgctggagcccagaggactcaagacactgttaattcactctctcctttcctttagcaaaagaggccctaaacaattgaaggtccatgccccactgtctctccaaccccacattcccccttctgagaacagacacagcccgtaccacagtcccttatatgcctctgcctctgttggccactctgggacaggaaccagagttagaacttggagtctgggctgagtcaacactgtctgtgggagagatggcttcctgggaagtctggcttcaaagcttctgactggccaagcacgaggtaccatggaggctgggggtggctttgactttcaaagtacctctcactagagacacaatcatgggatagaagtttccatagtctaggccaggcgtggtggctcacctggatttcacccgcctctttagtagagacaggtgaaaccccatctttactaaaaaatacaaaaaaaaaaaaaaattagccgggcgtggttgtgagcgcctgtagtcccagctactcgggaggctgaggcaggagaatggcgtgaacccgggaggcggagcttgcaatgagcgccgagatcgcgccactgcactccagcctgggcgacagaacaagattccgtctcaaaacaaaaaacaaaaacaaaaacaaattgttgttcccaggttgtctccttcctcctccctcctttccttccttccacagacagttacagaacacctaccatgtgccatccgccatgttaggggctaaagatacaaagatacagcgctgggggagaaatacatataaatactaatcagatccaaggcaatgatataagtacttcaatagggtaggtggcaaactagtgaccctaggccaaatctgacctgcaggcacgttttatttaaactaacaaagaatttaggtcaggcatggtggctcacacctgtaatcccagcactttggtaggccaaggccggtggatcacttgaggtcagaagttcgagaccagcctggccaacatggtaaaaccctgtctctatcaaaaatacaaaaatcagcctggcgtggtggtaggcgccttagttccagctactcgagaggctgaggcaagagaattacttgaacccaggaggcaggggttatagtgaggtgagatcctgccactgcacttcagcctgggcaacagagcaatactccctctcaagaaataaataaattaaataaaataaactgacaaggaattcaaaaattcgggtgggtttatgtaaaaattgggatttccaccttctcttaaaaaaaaaattggtgggccgggtgtggtggctcacgcctgtaatctcagcactttgggagtctgaggtgggtggatcacctgaagtcaggaatttgagaccagcctggtcaacatggtgaaaccctgtctctactaaaaatattttttaaaaaattagctgggcgtggtggcgggtgcctataatcccagctactttggagactgaggcagaagaatcgcttgaatccgggaggtggaagttgcagtgagccgagatagtgccactgcactccagcctgggtgacagagcaaaactctgtctaaaaaaaaaaaaagaaaagaaaagaaaaaaaagggccaggctcgtggctcacgtctgtaatcccagcactttcggagggcgaggcagggggattgcctgaggtcagaagtttgagaccagcctggccaacgtggtgaaaccccatctctactaaaaatgcaaaaagtagctgggcgtggtggcaggcacatgtaatccagctactcgggaggctgaggcaggagaattgctcggacccaggagacggaggttgcagtgagccaagatcacaccactgcactctagcctggacaacagagcaggactctgtctcaaaaaaaaacttttttttgataacaatgggaaggaggtgaaaagccacagcacttgatttttattttttatttttttacttagcatagtgggctcttctagaacactgcacgttttaaaaatttattttttttattttgtttttctctcctgaaactcaccatttagaacacagcatcttttagatggaacacgcattctgtttttcacaggctgcgtcccaccccttttcctattgacctaaactggcttgcctcattcatccatgttccctgcaatgattgtgcaggtgtcagaatttaggacccttaaaatgaaaagccatcacaggacccaaaggagggaacagttgactctgcgtgaggagggcagatcagttagcctttgaactaagtccaagttccttgtttatttgtttacttgtttattgtccccctaccccaccgccctcattgtgagactcgtaagagaagggcttcggtcagctgccttctccacagggtctccggtgcatagcctggtacagggtcggtctcaatacctattcgtgaaatgtgttgaatgaacagagttgctagaagcgccaaatggaaaagggaattccaagcagagggaacgttgggcaccaaagcatgacagtaaatagcatacagggaactgcaaatagttcctggtgagtggaagtgccgggagtgcgaggtgggtgggatcgagcagggtggaagtagcaggaattgaagcagggaaaatcgactccggtgggatcctgaagggctttttgtgctgcgctaagaaggtaactgtggaaccttggaagagatttgagaagtggagggacaggatcaggtagattcttgttgcacagaaatagctctggctgggtgggagtgtgggagatgtgggctccagaggagaaacaagcagcaaacagaaccttccattcaaactcccctcctcacctccaccttcccctttttgaaccccctgaaactggcctgggaatctattttaagagaatggtgccccctgctgactaagcctgggcttgcacctccccgggccatcagggaaattaaaaaatttttggccctgaacaaaaaagcacctggaaggcttgtgcacagaactgcaagtcgtgatgtatctgagagtgccttccttttcctaggaagagaggggcccataagaacacttgtgatcatgagtaatgccacaatagtgttgccagataaaatacagaacaccagctaaatttgaatccagggacatacttacaccaaaaatttgcgttgtttgcttgaaattcaactgcagccaagcatcctgtattcttatttgttaaatctgacaattctaggtagtgtgtagtggggtcaggagaaaactggaaatgaaattggacaggttactctccttgggtatctctgcaacctcaacctcatctaagcaggcagagctggagatgatgctttctcgtattttgcagtggctcttagttgtgtggttctatttgggaaatcacttttaattgagtcccgtgattatggtgatcctgtgtatggactccttcgtgaatatgaagagaactgtgggccctttttacagaaaaatgaacctactagctacacacacacacacacacacacacacacacacacacacaatgttttcggggagtccccagccttcatgtaagagtaacacattccctctagggctgtggtctgactgtggcagttcttgggttctgagtaggaggaaatggcgtcttgtcggtaaccccagctgaaacatagtgcttctgttagctctggccacccacacaccatgacaaaacacagaagtgggcaggaagaaatataccatccctccccttggtgaatgccttgaaccacttccctcttctacctctcccagaagtcacgggggagtcaggcatattcagaccaaaaacccacctgtcctcgcaggctcatactgccacagagtggaaggcactgaatgaagtcacgcttcatcccaagtccctcttcgctccccttcccgcccttcctgccaatgccaggcatagcccactggctcccactctgaggaccatgtctgtcagaaactggctctcaccagctggtggcaaccctccagaatatattctggacattctgggctgggtgatcaaacccctggtctgaacacgctgggggcagatctcagcaggcatgcctggagtctcattacagccctttctggaaagctctctaagcctccatagcctgctgtcctccaggccttatagagggaaggtagaagcagccaaggccgggggatgtggcttccagaatctcttaaagtatccaaattacagaaaatctcatttcaggttgcttctgtctctgtcagacaagcatgtttatgtgacattcagctctgctggactgcactgtggaatacagtgcccaaactgaccaagtacatcaagcaaacaagcatagtgatataccgtacaatgtatgattgtagaataacgttttatgttgaacattttctgcaattaaaaattaatttaatgaatacagtagtatgatttccaatcataatttcttttttttttttttgagacggagtttcactcttgttgctcaggctggagtgcaatggtgcgatcttggctcactgcaacctctgcctcctgggttcaagcgattctcctgcctcagcctcccaagtagctgggattacaggtgtgctccaccatgcccagctaattttttgtatttagtagagatggggtttcaccatgctggtcaggctggtctcgaactcctgacctcaggtgatcctcccgcctcagcctcccaaagcgctgggattacaggcatgagccaccatgcctggcctccaatcgtaatttctttggaagaagggtccttttttgtgaggttggatagcttttcctaaaatcttctgagttaggccaagagtggtggctcatgcttgtaatcccagcactctgggaggctgaggcaggtggatcccttgagctcaggagtttgagaccagcctgggcaacatagcaaaaccccgtctctccaaaattacaaaaattagccaggtgttgtggcatgcacctgtagacgcatctactcaagaggctgaggtgggaggttggcttgagcccaggaagtggaggttgcagcaagccatgatcgcaccactgcactccagtctgggcaacagagccagactttgtctcagaaaaaaaaacaaaactttttaaaccacaatggtgatatttgattttttttaaatgtccttacttgaaaaaaattaaaagccagcatacctccaaattatttgaaaattctactgggaactttcagaaaatccaaacagctggaaaccactagtttagcccactgagggttagggttccctgaccctggaaagtgggaagtgaaataggaggctcctgccctcctgtggggcagtgcaacgcgaccttcagctgatgcattttggtgggtttcaggctccctcttccaaatatggggagactggtttctggcccaacctcttcccaggagtgttctaaggataaaatgtcacgtactaaagagctttgggaaagaaggcgctctataaatatatgagattactgttcccaaagacagctggtgtgtttttagtgggaagggctgaatgattccacagagactcaggacaatttctctgccagggcatccggggaaaatgaccagcactactcataaaacctgcaaactgttccactgataagcggggccagacagaggcaaagggtctcccagtgggggcttcactttcctccctcagagggcacaggtccaaaacgcaacttgaattcagggagcctggagttctagtttgtgtctcagggacatacctagggaccaaccacaggtcacctaactctccgtcatttaggttttcccaactctaaaaagtgtggatgtctgctgagtccccttttcacaagggtggtacgaagctgtgagaaaacacataatccattcctaaatacctcacttgatagattacctaccattcatgtttaattcctgccaccttaagtctttttaaaaacaacatgggacttcagtttcttttaatgtttaactccagaatagctttccccatgatcgtaccccaaatcacactgcagcggggcagtgggggcagggggttactccccttgccacagatgaaaaggtgaacagggaatgaaaaatcattttatcatgcatctgagcatgaacagtaaaggagatggctcagatgctttgaccaaaatagctgtaagcaccatacaccccaaacgaaaaacagtgtcgggaaatttgtgtgccggttccctcccttcgacacatagctgagaattaactgcagatgaaagtcctttgatctgtagaaacctgaggcatcaggccgcccagggttagccatcaccatcacttttgtttgaacttgtctggtatttcacatttatcagccctattacaagttaacagtgttactgactttagtcaactttgactctcccagtccctgtgatcctgcaggtaagttgacaccccaagcaagctggcagctcacagaaccttttcaggtatcttcaagttgagcaaaacaatgcctcctgtaaaatctgctcttcttctatatgttccctatggaactgacctaggcaggagcaaggggcgaaaggtagtcaggcaccccttttcctgcttggcagtggagcccaagctccagctcctcctcctcctttcatcttcctacactctccagctcaagcctcaccttgcccagacaccttccttcgttgttatccctgcatttctgagatgcaataatgtgttttcctgtctccctattagactgtgaagtccctagagtgtaagttctagtcctacttaactttgaactcccagcatgttcacaatacatggcacccaaaaggaagtaaatgtaagatggatggacaggggactgaacaaatacactagaactgggcccctagcccaccctgggtaggacaggcttgctctacaagccatttctctaataacaggtgagagccatgctgagctgctgaaaccctgccttgctcatgactagtattaagcgtttttgagacaaccggttgaaaatggtagaaggaagaggtagagggaattggtctggtagctgggaagatgtctcttaaaacaggcccagatgacaactgcttgcacttgcaggtccccggccctagtaacatgctctaaccacctaaccaatccacaggagaagacagtttcgaagacccataaatctagtagggaagaagctaattgatgcaactttcagggtgaaaaaaaagacaggggaaagagggtggagaaaggaaggaaggaagttcagccagatgtacttaaagcatcttctctctccagcagctcaaaatgatagggggcttttgggggcagggctgcagcgacacctgggtccccagagagtgagatgagcacaagtgaggcagggcttgaaaggctgggcggggggtggcaaggcagccgttcaggaaggaggccgggctcccatctggagagccaaggggctggggctgctgaacagatggagagaaagttgcagctggtggaaatgcactttcatgtgtaaagtttggtccttggaggattgcgatttccaactctaaaggcagcagtgggcaggtggctctgctccatactccgccttttccctctgctgccactcagacaactcgacagtggctgtgccaggactcagccaccatgacttccgccagcatccctttcaacaggcagaagctggcatggtgacaccttggcacagcaaaggatggcagaggactgcaatgcttcagcagctggaggaggcaggggaataggagggattaacccagcctccctggaggggaccaggtagactgagaacagacagacagatggagggggaatatcaggaaaagtacatcacagaccttccaaagctgatcatgatgtatgcactgggtctccactctggtcttgatagagctgtggctgaaggggaggcagtggggaaatggcaaaacagtagattctgaaactctgggttcgttttaccccagcctcaatgaatatttcttttctgtttttgatttttagtggagacaaggtctaactatgttgtctaggctggtctcaaactcctgaactcaagtgatcctgctgccttagcctcccagagtgctgggattacaggtgtgagccactgcaccaggcctaagaaaaagacagaacacaactttgtttttttaatgaaatatttgcccacaggagctttaggagaggaagtgacttttacattctctggctctaatggacagccacccgtcctctaatgggaccagctctaacgggacaagcctcacccatcggaacagaagccattagcacaattctgcgatctcacagagttcctccctataatcctcaggttcttggaggaatcgcccactcaaccatgctaaccacacccgtgagaggagcagcctgggtaatgaacatccagctctgcctcttccctccctcttttatttaccatagactgctccagggcatgaagaacaaaaaccaccactctgtcttgttaaaatccaagtgcattttttagaatatgtgattttgcttgattttattttattaaaaaagactggaactcagtcccatattcctattaagtccattttcccaagagatgtcactgtttgagataataacttaaatattcttgatgtggaggtagtctctctcttcctagtgggatgtcttcttagctcctttcccaaacttggcatcaagaccaagacctatgaaaaggaagaaaatgggcttagccttatggggggaaatgaaacttaccaatgattgtggtggggtggggtagtcggccttgtatctccaaaatgggggctttaaataaaatacatgtcagaacactggttttatgtaacttcctcagagacaagagaatggcaccaggatactagttattacagatatctgtatctatataaatatatctatatagagatacagatagatatagatacatatataatacagcaagactaaaagaaatttaagagtcaaaacttctaggctatggctgaatgtggtgactcacacctgcaatcccagcattttgggagactgaggcaggaggatcatttgagcccaggagtttaaggccagcctaggcaacacagcaagaccccatcgctacaaaaaaaaaaaaaaaaattggtcaggtattgtggtacatgcctataatcgcaactactcgggaggctgtggtgggtggatcacttgagtccaggagatcaaggttgcagtggactatgatcatgccactacactccagcctgagcaacagagggagaccctaggaaggctggattagaaataaagcttccttttctccttttattttctttggatacagattttcactctgtcacccaggtgggagtgcagtggtgtgatcacagctcacctcagcctccacctcctgggctcaaacgatcctcccacctcagccccgagtagctgggaccacaggcgtctgccaccatgctcagctaatttttgtatttttttgcagagacaagggtctcatcatgttgcccaggctggtctcgaactcctaaactcaagcgatactcctgcctcagcctcccaaagtgttagaattacaggcgtgagccaccacactcagcctcttttctcttttaaaaaagttttctctgggctgagcgcggtggctcatgcctgtaatcccagcactctgggaggctgaggcggggggaatcacctgaggttgggagttcgagaccagcctgaccaacacggagaaaccccatctctactaaaaatacaaaatcatccgggcatggtggtgcatgcctgtaatcctagctactccggatgctgaggcaggagaattgcttgaacccaggaggaggaggaggctcacccgattggtgagctgagatcgtaccactgcactcactccagcctgggcaacaagagcgaaactccgtctcaaaaaaaagagaaaagttttctctaaaatatttaaacaaatttcataaatatacaagtaaattttaggagaaaaaattcagctgtcactgtgtctctgtgtggccacttacccaggaacacaagcacagtgcccacccactgcatggggctgatgggattggcgaagaggatcacagaggccaaaattgtgaagaactttcgagttgtagtgatgatggagcaggtcaggggaccaaaatacacaaccgtcataaagatgaagctctagagaaagataaaggtgaggtccggtgggcttctgggtatctgccattggtctaaagtctataaacagacctcagggctaatcttgccaccctcttcttccagccaggccagtctttcttagggaaccagctgccagagtagggaagccaagccatcccctttcaagcactcacctgacccagggcactggtcagcccaaagagcaggatgttatagatgatggcagggtacctttcagcaaagctcaagaactcccagagctccccagtgaacaggattcctgagaagacatgtcaacaaatgtacggcgcattttgtgcacacaaaatgtgcgcacacacacacacacacacacacacacagacactcctgcacatggcctgttaaagaactgcaagggaggtgggacgcgggaaagtgtatggtgtgggtttgcatcgtctcatcattgattcttctcatatttttctctgattagagaaactaaagagaattttgtgagaaaggcttgaaagttaatgagttacttctaccaaagtgattacaagcagaaatcctcagatgctgtagagatgctgacccacacatccttagctcaaggaagcccctcgcattagtcaccttcagccatcagcagcctccaccattaaccccagtgtgctgtataaaaaatactttctacatgtgcccaaatttgaaaagttaggaagcactgatttcaaagcaaatcattcacatttgaactgtcttcagtgtacagctaactctgtttcctgtgagcactacgtgtgtctcatttccctcatgaaagggaaagttcccaggtacctccctgtgttttactactgagtgtcttcccatgacaactgacacacgactctccttcattgtgccagtaacaagtagcaaacaaatcctgctggtgcaggtttttccaggaaggtttctcaagggcttgaacaaaagggcatcttggaactaattcaggcccttggtctgggcaactaacagctagagggatcaaaaggatgagggcagcctgccctctggtgatacatgggaagaacagcagaactggctctcacccattcccagcagcaatgtcgaccaaaggttgatgttcagcatcatgtggttggagcctgtttggtaatgagcccgcatgtggtcctgggaaacaccagtcagtccatccagggtcagcgataatagctgggaaagaaagggtgcagcctgcagtgaagtggccaacagggccctttccaaacccaggacacaggattctcactctcaggctccttggaaagccactgcctttaaagtcctcagaacaaaacgttgccatttggtcacaggtggaaggtggggagagaccatgctcactaccccccacccccgccccccggcccacgcactggactgacaggctaactgagctacgtagtgattttgtaatcagagtagagcaggaagctcacttcccaacatactgggaggggaaaggtagtcccagcaggttagcttcctagcttggagtatagtgctccagagaccggatcctgtgcttaggctgcctggattggaatcctgactctaccacttcaaatagccaagtgaccatgggcaagcgagttaacttctctgtgcctagtttcttcatctgtaaaatggagataatactacatatgagattattgttgtaaaaattagtcaattaacatgtaaaacactcggaacagtgcctaatgcatacataccagctactatcatattattttaaactctggcttccaggtttcttggaaagccacagtgagagacattattccttccctctttgctctcaggtctctgtgacctcacaccaggattcagccacaaccctcagagttatctcttctccagaatgagagctgagttgtagttaaatatttcaggtttcccactatggcattaatagagtcaggggcctgcagcaaagagcagatatggggacaaggagcaccacaacctcccttgacacagaactggccttctacctgcctaggtgagactatcctttggttaagtttgctggaaaagggtgccttccccaacaggatctcataccaagagtagctctccatagccgactgtgtgttcttctatcccaacaactttcttgggtttgtacatgaaaagggccactccagccacaattaacagcacacacaggtacttggccaacgggtacttcttcttcaagagggtcaccccaaggagcatgactacagggaaaaaacagagtggaaaattcaggcatccataaggtattgatgaccccaatgccctccctcccaggaaccaagaaaagactcagggagaaaagaatgactgagaaggaaggcttagagaggacaaaaggagggtgccaggctggcacctagataaggattgagcaacagggttaagtataagacagggaggaggtagagaacaaaggtgaaaagtccaggaagggacaggacaagggtagggaacagtggagaaggaaaagaagttgagataaagaaactgatgatcaaaatgggaattaagttgtctaatgacaatataaacacatgcaacacagaaatggctgaccaagtgaagcaggctaggtcagcctttagctcctattaaggattaccagcctatgaacatcacaagaagtgacacagatgacaggatgggcagcagggagagctgggggaaagtccctggagacagccatgatgggatgatgaagccgagagggacacagttgtagcagagagagagcttactataggaagagtgacgacagaagaggaagaccatcttctttgcttacctgggattggcttgcaggatttaccaaggacctgaaattaaatccagcaaataatttctgagcatctgtgatgtgtcaggtactatgctaggtaccgcactgattaagatgagtaagcacagggcctgcaccagagacctcagcctcagaaagcagccctatcatggcccaacccaccaccactaaacgtaagttctatggttctatacactcccaatgtcttacaggaccgttatcttttttttttttttttttttaactcacagacctgagggaagaactcttagtccttttcaaatgatatctgagccaaccatcatcccaccctgaggtttcacctgagttgggtagttgacaaactgtagtgctgaattgctggagaccatggcacccagataggagatagaacaggcagcatagagccagctccgggtacgatccaccctggcagtgtcaaaaaactggatcactgggagaagacaaaaaaaaaaaaaaaaaaagaaaagaaaagaaaaaaaaaaaaaaacaagagaaacctggtggggctaggatggaccactaagcaaagctgaagccacatgaaaggaacttgtctgtcaaacaagacacaagctatttctgtcctgttacactgggaaatctctgaaaattattcatctttccaattctacctaagcccaacaaaagaccacatgcagggtggaggtgggggcctcattcagttcaagggaccagtcagctctgctgctagtccccagggaacaaagagagaatgctcaaagcatgcttgaagctgacacacaaaagaaactcaaagggaaagaaaaaaatgttttaagtattttcaatggggatttggaatatagaagacccattctctgaacatttctaactcagaagctgataaaaattggggaaataatattttactccacttcaaagtcattagttttacagacttcacagagaggctgtgtaagtacaaaatggggtggagatcatgagttagcctttaaggttgaatcaatgcttaatgcccagcatactgagggaacttggggtggtggggtacccaacaaattactatctgggtactcacagatcttggcaaacacagcattgatcacacattgaatgaagaccaaagttaaggcaaaggtgaacgtctcctgcttggctccttccccatactttcctcttgttctagaaatgaaatgcatgagaaaagagggagaaattagtgtatttcactcactgtcatctaatatatcccgagccactgaaaactttaaaattatcttgcctctctggatgtaggcagagtttgttaaggaccactaggctcatttgcaaaaggggctgattttactggatctagaaactagacatcccagcctactgattccaaagcctaagaaaagaatacccgaaaaagacggagaggaaacatgcagaacgagatagtgaaatcaggtaccccaggcaggaggagacggtatttcggctatggcaccaaggccgaggacgaataggttgtttgcaagcatctgggagtaccaaaagggggccgactcgggtcctgtttgaggaatagaagtctcagcctgtaaaacgcaggcccttagaaccaagcggggaaaaacagctaagaaaagaaaataaccaagtccgaagaatccagaaaataatcctggagttctggaattctgggtaggctcagccatagctgcaaaagtagtagggtgctaagagggcgacagccgggcaggaggacaagaggaaagcccgggtccagaggcagaaggcccgggatccctgtcacaggctggggagagactgtcggcccgcccccggggtcgctcacatcttttcctgcaggatcccatagtaaaaatagcagacaaagacacccaggaagcagagcggcaggcgcagccggtcgggcaccagggagctgctagaggccatgagacgcccagaggagccgactggagacccgctcacaaccggcaccggcagcagcggcggcggaggcgacagctccagccggacatcgccgaccggcggcaggggcctcataggagctgcatgcgaccgctgtccagcagggcccagcagtcactaccagaactgccggctcatggctgccaagggggaaactcctcagaacccagcaaccacttcctaggaaagaaaacccgccctgggaccttggctccatccctgagggccaggggaaccggcagcctcgagactgatccctcgccctggagatttttccaatcaggcaactctgaggacaactgcgacccagagcaccacagggtgtcctagagccacctgggcgtagaataatgacgtataaggatgtggaggccaccaattggctgcgctgtgcgaagacggacaggtaggcggggcgggaggaggtgtggtcggcagagcaaatccaatagtcttttccgcggcgggcggccaggcttctgctgggtcctaatgccaaattccttactggagcttcagcgccgtctagctgctgcccagcgtcagcgactttacctgctcattacctaggcacatcactaggcttccaagggggagagcggcacagtaagtctcggcttggtcacttaaaggcggggtaacctacccgtgtcacccaagttctgagccagagttttccaggtctggaaactagggataattagtaatagccaccttgtcgcctcttggctgttgtgaggatcaaataagagtgttttgtaaactgtaaagtatgctgtgcaagcttaaggtattattagtcatcactgtttgtcagccctgatcttatttcctcacatcgaggggtggaaatggaagcttactgaagtcagttttcttccaagtcttaacaactcaccaacaatggcgcaaacccttcggccgcgctcctgaatatttcccattaatgagctcctcgttggatcccttcctcatgcaagtgttgggtcttcacttgctggcacgaattgccagggcaagactgacctcaggtcttcctactactacctccaaccccctacttaattggcccaaatctccggccacctggtggactctgggctgctctctaggtcgaggctcctcttctagcagcctgctcttttggcacagcctcaggcaaaggaaggaaatactgggcagcaccacacccatcgctccgggcctgactcaataaggctttgcgggggagccagaagtcttttagagggaggagtaagggatagaagatagggtgtccccagcccactgtctcctcgatattagtggcatgggaaagccccatacatttgctctcttgctcactagcttactctactggctcagcccgcgatgccagggcaccaaatagctgggaagagagacctgccagctctacttctttaccagctgggacctcaaacaattcgcttgtcctgagtcgagtttcctcacgtgaaattaatgggaatataataacaagcaggagagcgctgtggttagaaacatgggcactggattcaaatgatcaggtttccaatcctagctctcccacttcatatctgtgtcttttggggaaagttattcgatctatttgtcctttcctgattatacagtgggacttaccatatttctcttactgggtggttgtcatatttcaataacactttatgtaaagcacttaacatggtagctggttcttaccagcccaatgaatggtggttgggatagcctggtttaggagtttgttgtcaggtcttatgaggcagatacaattgtacttattatgactgcccttggggtagtcaactgttcacccatacaatggggatgtgtcttttgtgaaaatgcttcggaaattccaaagcatcattgaaatattgagatggttattcccattttccccaaaagcctaagagctcttacaggtgcagcattataaaggctgcgaaaggataagagtagtgtctttgtatagtttctttgttccctttaaggctgcacactatgttgtgggtactccctgagatgaaccaaagcttccccaaaactgtcaagagatccaaccagtgcaaagaacacccacaatgtcaaactgtcttcccttggtcacctgcttttcctttctgaaatccattctccttagggagctttttcagactcatacaagaatgggtaacttccccagtgactccctcaccccacctctaggacaaaccaccctcttcattctggacagccttttcatgggtctgttgtttatatgtccatgtaaagtatgcaagcatggtgtccagaggacaggaactctgtgtacagccataacaacacccagatgtgggaattgaggctccttctcttgaagacaaagatgaaatgatcagtatatacccttaatctctaccccactcctccttccccaaatatttaacagaacttcaagctgctgggaatatttatttatttatttggtctattaacaccaagatctgcaaaaaacaacctctaaacacaagataagaaaactcgaacattaacattcttcaattttgtgtaagctctgcagtacggaaaatatacaaacttcaaacagctgcaaaaatagtgtctttgggagaaaatagagtctctacatcgatacaagaaaaataggcatttttctaatccatccagccctggggcgggcggagagtatagagtcgccatttgccacctggaggaatgccagctctcctccccactacccacctggggctgggcgggctgggctgctacttaagacaatctttagtcagggtgaaagcgagatgaaaatgccacttgggaaaacacttgtttcctccctctgccagcagctgaattggtcaagtgttatggcccgttagggctgctttggtcagctcctccaatgagagggaggcatgggaatagggctgagaggatgggggatctatcttatggtctcctggaggagagggaaggaaatctgtggcgtcttctctccttcgttcatggccagcttgctctgtgacaaaaataagggcctcctatacagtcatttggactgacacccaggggtgggggactcaagaccttctgggtgttttccaccaagtgagggatgtggcaggtacacaggtgtgaattgtgagctgcccagctactagtggagaaggcaggtcccatcacgttcagaggggccggtgcccatcaaaaagaggacccagggctttgacacagtaagtgaaagaaagtgctcgaaggccgagagggaagggcccctccataccccatctcaggggacctggggagggacctgccaccaaggcactggtctctatggtaaagtggggcaggggtgggaccctcagaccatcagggagctctggaaaagcacaggctcttctgatggtggggtgcgctgccatggctcgaatggcagtggggaggccttggaggcttccggatccttccgaggtggtggcctggggctggccgggggaaggggagatcccgggtttgaggggcagttacggaagatgaagcccatgccggggaagaggggcttcatcaggttgacggggcagaaggctgagccagtcgggttgaaatggactttgttcttgtcaggacaggaagtcaggaaggccaggtcaggacctggagacctggaggatgaagagagacacacaagacacatacgtacacacagagagaaacagacagcgagagagggtgagatgtcacagcatcaaggcagcaggagagctgggtctctgttcaaacagaattggaacttgaccgaaaaccaagcccctcatctctctatttttaaaaaaatatggctaaacaacgggaaatgctcttcagctaaaaaaaggagggattgaagctagacaggaaggagaacttcctgacaatgtgattcaagaagtggagaccaagaaatcttttcattcgaaagatttcatcagtggccgggcacggtggctcacgcctataatcccagcactttggaaggccaaggtggatggatcacttgaggtcaggagttcgagaccagcctggccgacatggtgaaaccctgtctccagtaaaaatacaaaaaattagccgggtgtggcagcatgctcctgtaatcctagctattcagaaggctgaggcaggagaatcacttgaacctgggaggcggaggttgcagtaagccaagatcgtgccattgcactccagcctgggcaacagagcaagactccatctcaaaaagaaaagaaaagaaatatttccttagtgaatggtgtttttggggacagaccacatgcctgaaagcagagatcaaagccaagtgactaaagtggggtttctcagccttggcaccactgacattttgggctggatgattctttgttgcggggtggggatggaggcattgtcctgtgcattgtaagatgcttaacagtgtccctggcctctacttactagaccccagtagtaccacgactcctcccctctagttgtgacaactaaaaatgtctcttgatattgccaaatgttccctagttgaaatctactggcctaaagaatctaattgttgggcacatttgaaaggtatggggttgtttattgttgttgttttgtttttgagacagagtctcactctgtggcccaggctggagtgcggtgtggcaggatcatggcttactgcagcctcgacctccccggtccaagcaatcctcccacctcatcctcctgagtagctgggactacaggcatgaaccaccatgcccagctaattgctttacttttattttgtagagaaggggtctctgtatgctacccaggctggcctccagaaaggtgtgattttcaaaactttgagaggaaaggatggtaacaactgtgagaaaggcagctagaccttatcggaagatctgggttctaactcaccatgtggtccttgtcatatctgtctcaccctcctttttaattttaattttttaattgtttttagagacagggtcttgctctctcacccaagctggaatacagtggtgtgatcatagctcactgcagcctcaaactcctaggtgcaagtaatcctcctgctcagcttcccaaggagctgggattacagatgcctgccaccattctaggctaattttattattattattatttttttagtagagatgggagtctcactatgttgaccaggctggtcttgaactcctgggctcaagtgatcctcctgccttggcctcccagagcactgggatgacaggcatgagccaccgcacccagcctgtctcacctttataatgtgagaggaatcatccttcctcttttgattgtttaggaagatgggatgataaaaggtcaggtcagagagttcctgagtaaggaatagccctgattccttactgtatggccaagcctagagggtgaaacagccctaagaagctgacggtttgaaaatcccaggtgagaagacaaaggtatgggaagacggtgaagctctgccaccaatggttctcaccaatcacctttttcttttttactttttattgaagtataatatatacactcagagaaaaatgcactcagtatacagactgataaattggttaccatctttttttttggacagggtctcactctgttgtccacgctggagtgcagtggtgcaatcttggctcactgcaacctccacctcctgggctcaagcaattctcccacctaagcctcctcagtagctaggattacaggcacccaccaccacacctggataatattttaacattttttgtagagagggtgtctccctatgttgcccaggctggtcttgaactcctggactcaagcaatcctcccttggcttcccaaagtgctggaattataggtatcagccactgcacccagccaattaccatcttaattccggaattccaataattctagagcccaggaagagcaaggtgtgaagagaagagcagagacctggcacagagtcaggagaggtggagggtaaaggcccacgtggtgggtgtgtttgggaaggcctggcgtcctagagactccacagtggcaagggcttccctgatggagaagggtttaaaagagtcccaatttacggagggatggggaatgggcaagagagagaacgttctaggtgtgtgcatgtacgtgttgggaaggtgaccaaggggagacccagcaacactcagagaatatgatggcaaccagcatgaccctgaataccttgactccttgcctggaaaatccagatgatcttggaggggacaacagctaagaagggggaaatgtggcagaagaatggctaaacacacaaacttcccaataggaaagttgattaaataaagaaacctcagtgaactacagaatttaaatcccggcatatcttagaaaatcactgatggatcaccaccactctttttttttttttttttggagacagagtctcagtctgttgccctgactactgaagtgtagtggtgcgatctcagctcactgcaatctccacctcctgggttcaagcaattctcgtgcctcagcctcctgaggagctgggattacaggcatgcactaacacacccggctactttttgtatttttagtagaggctgggttttgccatgttgcccaggctggtctcgaactcctggcctcaagtgatctgcccacctcagtctcccaaagtgctggcattacaggcgtgagccactgcacccagctgatcaccacttccttttttttttttttgagatggagactcactctgttgcccaggctggagtgcggtggcgtgatctcggctcactgcaacctctgcctcccaggttcaagcgattctcctgcctcagcctcctgagtagctgggataacaggtgcctgccaccacacctgtctaattttgtatttttagtagagacagggtcttgccatgttggaccaggctggtctcaaactcctgacctcaggtgataaacacgcacctcagcctcccaaagtgctgggattagaggcatgagccactgcaccgagcccaccacctctcttaaagggttaatgcaggggcaggaagataaatgagctgactttaaggcctcttctggcactgagtctatgaaaaaatcaagatgagctacagcttaatttccacccacatttccaggttgtaattactccaccataatgtggattgagggagggtacaagagtctagagcctgctgaagctaagagatctggcctcttccctccacagcttctcagaggacctaggagtcttgaagggatcccaggcaacaataataacagtaacaaaacctctagtggcaatggttttctctgtaactcctactgtggcttctgtatgtaccttcggctgccaccatgggttattgctcccttatttgagatacaaatggtgctctcaatgacccaaatccagtcccagctacatcttcactcacacaccatgactaaacttcctgactgccactgaaaccccaacttggtgtgaatctgccctggtgagtattaagctggcagcaggaaatgaaatgagctctttggtgcctgctaacggggacaggggcatttggaaaggttggctctcaattctttcggctaatgggaggaaagtgtaaagaatcaacagaagaatggcttctgaacgatccaatctggtttggaaattttccatagtccttacttgcaaggactggaaatttctgtctgggagttcatgacacttgaaccactgcagccacagggtgaagacttgactccgaagctcaaactgttaagctgtttaggccccccattctactccagtggggctgaaacacttctaatctctgactgaagagaaatactaatatgttctccccacaccccccatctctcgctctcgctctctctctctgattatggtctagcaaattctcacaccttccccggagatggaaaaaaatagaagaaacaaagggcttaggtttcagatatattttctttccagctcctgctgcgcttgtggctggcatgtgggcagagagcaggtttctatggagataatgataagcaaagatttaagtgctcagagtaggtaatgtcaacacgtttgatcatggaaagctggcaatacttatcatctaaagttgacaacacctctatgacaagagagagtccaagactgaagaaggtgggagaatgtaggcccaccctcccctcccacaccctgtccacttggtgtactcacgtggcttcttcaaacacacgcactttctcacagccttctgggggctcccgtttgaagatgtagctatgattaggtcgaggggaggcagcaaaggcaaggactggagatgggctgccatcttcaagaaaggctgggtgtcctggagaggaggctgtgaacagagcaaggctaagtctagtggagatgaagggaaggcctccacttttctgggtccaggactgaggtgtaaagtggcaaggctggggacacatggtaaggaagagggtagcgggtgtgcttatccagtgtgattatactctaccttaaaaacctttgaggcagcttacaaaaatacacagtgtataacagaacagaaaaacggagttgaatgtatggaaagttaagatctcataccaattctatattcccaggaggtagactgggaccggaactccagatctcagacttgaaggaatactaactgtgtctctctctgccttcttccaagactgtcacaccctccctgccaacataccacagcttcttcctgtccacagtcttgaaaatctatcctttcttccaagaactcttctccgactcagagaagcaatctttactcaaccccacttgtaggataaaattcctctccctttccacacagtgaatgtactttgcctaggttgcaaatattgactttatctgtatttatctcacatttattcctccttattctatgctctgtttacccatgtgtattgttagatcatgcccttgaccagcctacctcatggggttgatgtgacaatcaaatcagacaacataggcacagtgctttataatgtaaggattattattaggaggtaggaatttcatctcattttctcagagaagtagctagggcattgtagaaaatagagatttggagtaaaaaaaaaaaatgagttttggtctgggtcaaactatgcaaccctgggcaagcaaccacattctcttactttgtatcactcacaaccactttgaaaccattgttgggaatgagtacagtggacacctgaatgaagacttgctgctttcccctacagcttgctgaacctcagcccaaaaatggggatggcagggattgcttctttggatcccagtgaggattaaatagaagtataaatgcagtgacttcataaattatcaatcagaacaggatgtatgggaccattattatcattggtataatgtgcagaagaaagatgactcataaagatattctagtagggtactgagaatgctaggcctgaattgactagaggtggaaaagggagtggagccactcatgtgccccagagtcagccctgctgcctcagccttcgcggcttacctttgtcgttgggggtggatgccagctcctcggcggcaccccgatgttcctcatgactggccaggccacaaggctggggagatgccaaggacatggaaggagagctggcaaggttgccaggctccaggaggaggaggggatgatcacagctgccactctggggaggagctggggcccggtgcccatcagggatatcaaggatctaacggggaaggacggtaaagactgtcagccctgagtatttcaggcctgcagcagcacagtgaccccaagggtatttcccttgctgctgtcattctctatccatgacacacaaccacagaacaccatttcctccagcgatttatttccctggccacccttcaatctagaagaaactccctcctgtttcttccatagcactttgctcttatccctaatagcactcacagtccaatgtataattacatattcacctgtagggcttgatcaatgtgttgtccccataagactataagcctcatgagggcagggaccttctgtgccctgggctctaggaacacaaagatgataacgtatgctggagggcacaatagcggcaaaccaccaggagcctataagtgctgtaaccattgcagaacaagtatgctgatgattagcatgtgttacatacctcctcacccccttttaaaaacactcaatggtacttgaacctgtagctcaccaaattatgtgcatgtgtttgggtatatgtaaaatcctgcatacatgcaaattcaaaaccaactagtaggtaaatcataaactgagaagtgtgcccattagaatcatattaatattggccaactggcattccccaattaaactgtgtcaatataaaattgtgcctgaggccagctgggcgcagtggctcacgcctgtaatcccagcactttgggaggctgaggcgggcggatcacgaggtcgggatatagagaccattctggctaacaaagtgaaaccccgtctctactcaaagatacaaaaaaaattagccaggcattgtggcgggcacctgtagtcccagctactcgggaggctgaggcaggagaatggcgtgaacccaggaggcggagcttacagtaagcccagatcacgccactgcactccagcctgggcgacagagcgagattctgtctcaaaaaaaaaaaagaaaaaaaaatgtgcctgagaccagcacggtggctcacgcctgtaatcccagcactttgggaggccaaggtgggtggatcatgaggtcaggagatcgaggccatcctggccaacatggtgaaaccccctactaaaatacaaaaaattacctgggcatggtggcgcatgcctgtagtcccagctactggggaggctatggaaggggaattgcttgaacccgggaggcggagattgcagtgagccaagatggcgccaccgcactccagcctggcgaccagagcgagactctccaaaaaaaaaaaaaaggccggtggctcacgcctgtaatcccagcacttagggaggccgaggcgggtggatcatgaggtcaggagttcaagaccagcctggcaaagatggtgaaaccccatctctattaaaaatacaaaaattagtcaggcgtggtggcaagcgcctgtaatcccagctactggggaggctgaggcagagaactgcttgaacccgggaggcggaggttgcggtgagctgagatcgcgccactgcaccccagcctgggcaacaagagtgaaactccatctcaaaaaaaaaaaaaagtgcctgagacttcagcaaaggtagcacatattctgcctgggagtggagtcggggagaaggctgcataggagcagcttggcatgaaggaggcatgcgtgttaccaggtagagatggagaaggggcagggagcagcaggcactgaggcgcccatgccggtgccgagcacacggggaacagtgagaactggcagtttggctgaagatgacccctgtctgttcctcccagcgggggggcctcctctctgccaatccttgccccctgtctttgtactcaccaccacaaagcctgccctagtgacatgggttaaggccatttgagactaataaactccatttgcattccttttgcaggctggtgtttgtatgctgctgtttgcgtagccatagcctgtgaggccccagagagcaggactcccagttcccctcgcccaggccaagtgaggcacggactgtgggtgcactcagggtgcagccgccactcaccctcagcagctcctcttctccctgctccttcacaaatacctcctccagctcttggttgagcccttccaggctcctgtgcaggcaggggctgagtcgcaagacaggggaccctgaggggaagctgggaggggacgcctgaggaagaggcaaatgacaaaatcacacacagccccaccaggcctagacagtctttcattctgaccaggggtaatggtcatgtccacacagcagaactgagtgaatgaagggtgatttggggacagttacagattgcaataggtccactcagggcagttttctccaaaagtttgagctttgcagagtctactgtgtgctgtagagtcattgcctcaattatatggggatgggggtagaagagagggagattcagaacggcaagaagcccttccaatatcacacagcaagaccaagtttggactaaaacttcacaaagcatgcagtgtggtagggggctcggcagttccaagacccaggaaacctctgcccatataggggggcctgcatggaggagaacagaggggagagggctgggggagaaaacataccctcagtgctccccgcactgcgtggtcccctaggagtggtgaacctcgctccttctctttcccactgcggctcagcttcgtcctctgcagttgttgcttcaacttggaaatctagcagcccagagagaagacgacagaggcagattaaggaaagccaaagtgcactgggtccctcttccaaagagtggctcctggcagaggcccatgaagatatatacaaggaggatggaagttaatcttccatctcaaaatagctcaatggtgttaaaactgtgatgatctgttcctcagacgagttggatacctcacttaactagatggattggattccaaataattaaaaatatacaacatggaaaccattttgtcttttacagattccaaaggcatggactacccctcttttttttttgagactgagtctcgctctctcacccaggctggagtgcaatggtgcgatctcggctcactgcaacctccaccaggttcaagcagttctctgcctcagcctcctgagtagctgggattacaggcacccaccatcacccccagctaatttttgtatttttaatagagatggggtttcaccatgttggccaggctggtcttgaactccttacctcgtgatccacccgcctcagcctcccaaagtcctgggattacaggcatgaggcattgcgtctggccctacccctctataaatagcaatggaagatgatgtttctgaatgctaaggacattcagagtacattcacaacgatcttagaggccctgagaccaggaaggatggggatattctcccttgtttaaagtagactacactaggaacagggatagacactcaagaaggggatattggatttcatcttgactttcatatcctgagactactacagattatcatcaacagttttgaatattatcccatcacatgtgcaattctggaccttcttgccctcaactggaaaatgctcaggggatgaagagctatttaaatataagcctaaattaaatggaattcagagagtagatctgctacccacagccataagatttatgactagagccaagaagaaagagctttccaatttgctattgtgggtcactcataccacatctccccattcttagtgtgaataacttgcttactctgaccattgaaaagtttaaatattttttatttcccccttgtcttaagctctcaacgtattcacttcatattttctcattgttctcagcaatagagggcagaagcaacttcctcttgtaaaggcgtgcagggtgagtcctatcgagttgaccctctcagaagctgccacacagcatgtcaggaggagctgatggggagccctggaatattccagcctacggctttctccccttaacctcaatgacttgagcactcctgagggagagggagggccaggaaaaagtgtttgggagcatttcgttatttttctcttctcttgaaaataaggctagggctgggcgtggtggctcacgcctgtaatcccagcactttgggatgctgaggcttgcagatcacctgaggtcaggagttcaggaccaccctggccaacacggtgaaacccatctctactaaaaaaaaaaaaaaattcaaaaattaggtggctgtggtggtgggtgcctgtaatctaagctacttaggaggctgaggcaggagaatcgcttgaacccaggaggcggaagttgcagtgagccgagatcgtgccactgtactccagcctggccagtagagactctgtttccaaaaacaaacaaacaaacaaaaaactagatgagtagttaagaagtaaatgaggctgggagctcctaattcccaggaactccctccctgtcttcctccagtctctgagctgcttatctggatccaatcccaaagaacaatggtggctccagccctgtgcttgctgctgaaaggcactagcagcctctggccaagcccctgcctagcaggagggtctgggctcctaagacctggccacttggagagtgggagtcagctaggaaggagccatctcatcaggaaaaggccaggtcaagataggagaggtgagcagtgtgacgccaccatggagcagatgcattgcatggtactaggggatcgagaagaagccgctaccctaggcagggagtcaaagtgggtagctacctcttttcggtggtctgtgctgccccaggatgctgagcgcttgtgtgcacaggaactggcacgctcaccttctagctcttgccaggacaggggcgtctgcagggagagaaacacagtgagacacagcagcttctttggcaggcactggggaacaggcacactgttttctgggtagaggtgatggccctttgagcccttctctctgctcatcaacctctgaacactcccagtcggtgttcttcttcaggcttctccacctgcactccctccttcccagttcatgtcctccagcaaacattccctgatgacccaacagggccaacctcctctttactcttttctgagtgctatacatatatgatatcccagttattccagctgatcctcagtggtgaggacaagtattgccactcctatcccaaccagctccaagagaatataggctcaggctccgggaatcactggcactctttattctctcgccctctacatgtgtagcacaggcccaggctcctgggagcctaataaaaacaagttaatatataggagtgcattaagggattattaactggtaaaacaggaaaaaatgtcaacataggtcccctgaccaaagcaggggactcctgtatggtgcagtgcttcatttttccctgcacatggaataagtgttactcccccaacccctgcccccgctgcaaataagcaggaaggagacattttcagaaaggagagagccacagttctgaatccagccctgattcctgatccctcttggccttatcactccttttcctcccgggcctgcccagccctcataaaaacagggccctcagtgtgcatcttctctcccttgctgcaccgaagacagagtgtccaagatggaggcagggagagctgcaggactacttcctgagccccgacccaagggaggaagctgttggctctaagcatgaagccaaagaggcccagaaccctccccaccaccagtatccctacttccattccaagggaggggcccaagggggaacgctccagtggaaccagtttctctctaacttctgtgcacaagcacaggctgccaaaaacatgagggcctgggaactgtctcctccaagagatctgctgacctcccccgagaggttgttgcaaacagaaaagggggaggacggggaaaaaaacccaactactcgccacccaacagctgctaagaggagctcggcgggggagtctgagcaagcttgtgagagcagacggccgtatgtgacagctgcagtggagaggggccactggggattggggctccctggctcttccttctcccagctgctcatggatcagcacctttactgggccacgcaacatagccagggtgagacaactaccctaactttcttgttctgatgagcatcacgagtaagtaggtaacagaggagtctacaaatgctaaataaagcatccagagatccatttccccacaattcccttctttaggaaaagggcagacagcacatccttcaggcccaaatcttcagcacaaaccctaaagccatatactggctctgtcagtatatggaaagctacttccaaatgcccatgtctctctaaaccagggttctaccagacaaagcctcagaaaaggctggtgcatgcactgaaaagtgaggaggaagcccatctctcccagccacctcgacccagcagacacacaaaggatcctctcctcaaggctccaggaccaactctaaagatgactacctctgctaatcgaagctgggccccgcaccccccacacaaacctgttgtccctggaaggtggcagaggctatagagggatgacaaaagctaaagggaccgttctgcccatttcccttcctcagggaagatactgtactcacaggtgggtggtaacagagaggaaaaaacagccacattcaggccgccacgggtactactaatatctcttgcaaactcttcaagtacctctttcttctgggatatgcgagaggatggaaagagaaatgcaggctagcacaggacttaaaaaggatgtgaggctgggggtggtggctcatgcctgtaatcccaacactttgggagactgaggcgggtggatcacttgaggtcaagagttcaagaccagcctggcaaacatggtgaaaccccgtctctactaaaaatagaaaaattaactgggcgcctgtaatcccagctattcaggtagctgaggcacgagaattgcttgaactcaagaggtagaggttgcagtgagctgagattgcaccactgcactccaagcctgggcgacagagcaagacagtctcaagaaaaaaaaaaaaaaaaagaaagaaagaaaaaagaaaaaaaagaaaagaaaaagaaagggatgtgaaaatcatagcagctagggtcatctcctctctcaatccaagtgaccccacctctctccgctcagcaacgtcttccaccaaccactgccttctctgtgtaaactatactactaaggccatttctttgtgtcaacacccaacccctggccatagaattcaccatctgacccttcatcccacgggctctccatccttggctctctgtcctcccaagcaaacccatctccctctcctttttcttaccttacccccaacctccaagcctggtctcccgatctaagacggcctgcccggccaactattcccattcttcttgtcagggagcctttcctaacttgtctgcctcaggctgactgctcttctgctctgtgtctcctccttgcagatgggctctgagtgtacagcattcgtgcaatcaacaaatagtggctgaatgtacactgtgtgcccggtactgtttcaggcactggccatacaaccatgtacaaaacaacacaaatacttgtcccgtctgagtttatgttcttattggggagacagtttaaacagtgataagtgccaaggagaaaaatacagcaaagaaaagggataggaatgctgggtgggggatacaattggaaatgtcagggaggcccccaatgaaaaagtaacatctgaataaaaacacgaaggaagtgagggagtgagtcatgtgcgtatctgaggtaagagtaatccagacagagggaacagccagtgcaaaggccctgtggcggcaatgagcctggcatgtttgagaatgataaagaggccagtgtggctggagcagagtgtgtcaggagatgcagtgacaggttaaaaaacagctcctcaaagatgaggaacctataaatgttaccttgtatagtaacgtttttgcagatgtattaaggatcttgagattatccaagattatctgggtggaccctaaataccattacaaacgtccttaaataagaaagaggcagagggagattagatgtatgcacactgaagaggataaagcgatatgaccacagaggcagagactcgagtgatgtggctgcaagccaaggagtgccagcagccaccagaagctagaagtgcaggaacagactctccccaggagcctcctgggagagaatggccctaccaacaccttgatctcagcccagtgaaacagaacttggacttctggtctccagaactgtgaaataatacatttctgtggtattaagccactaagtttgaggtaatttgttaaagcagcctcagaaacctaatgcagtaggttatcctgtgtttgaagttgttgacatgctgacatcgagtattcttttttttttgagatgggagtttcactcttgttgcccaggctggagtgcaatggcgcaatcttggctcactgaaacctccgcctcacgggttcaagcgattatcctgcctcagcctcccaagtagctgggattacaggcatgtgccaccacacctggctaattttgtatttgtagtagagacggggtttcaccatgttggtcaggctggtctcgaactcctgacctaaggtgatctgcctgcctcagcctcctaaagtgctgggattacaggcattagccactgcgcccacccgacatcgagtattctcaaggcaggagtgtacacaggtgtggactatagcccctcctaaactgggagtgcccagagtggggactgtgtccccagtttccagtgcccaaggttagataggactcctcttctgagtctcaccatgtagtcacagctaagaaaagctccccttcaaaaagctaacctggccaggtgcggtggctcatgcctgtaatcccagcaccttgggaagccaaggcagtaggattgcttgaggccaggagttcaaaaccagcctggtcaactagcgagaccctatctctataaaagaaataattttaaattagccagttatggtggtgcatatctgtagtcccagctactagggaggctgaggcaggaggaccacttgcgcccagagttcgaggctgcagtgagtcatgataataccactgcactccagcctgggcaatagagtgagaccctgtctcaaaaaaaaaaggaaaaaagaaaaagaaaaaactaaccttctggccacaacaggggtcacaccatgctgctcagtcattctagatgaccctttggaagcagggtagagctggagctcagcagaccaaaaagtcatgtttgtctccaggcacggtgactcatgcctgtaatcccagcactttgggaggctgaagtgggcagatcagatcacttgaggtcaggagttcaagaccagcctggtcaacatggtgaaactccgtctctactaaaaatacaaaacaattggccgggcatggttgcacatgcctgtaatcccagctacttgggaggctgaggcaggagaattgcttgaagctgggaggcggaggttgcagcgagccaaaatcgagccactgcactctagcttgggcgacagggcgagactctgttctccaaaaagaaaaagaacaaaaagttgtttgtcagggggagtcatgcactggaacagatttgacaccctggcccagggtgagcagctgagggacaagtagggtagcttctgaccatgagtggcatgggccagctgtgcagatgatacttaggttatgcaaaactggacgtggccagaccaaggaagccttgcctgggattgagatcccagagcaacatgtggaaggacagctgggcatgggggtggaggacagtttctcaaagagccatctaatataatgaggaggaggggcgggatgaagctgaaaaccctccaaactggaatctctcagcctccagcccaaaagtttctacctagactccatgaccacaggcaggaaagtcctggccctcactgtctccagtgaccttggcacctgagtaagctccatgtgtggagctgggctaggccctgggaacgtaacccactatccctgcacgggactgtcaagcagcatggtgcctggcctggtgtggaccgtcaggaccacgtgttcaactgaaattctgcagggaatcagtcccttaggtctccggccaaacaaaaaggccggaaaaggctctgagggtggtctgctggtcagcactgaaaactggctgcaagtggccaaggccaccatctctggccctacagtgactatgcaactctcagattttccatcatggccccattttcaaatgtttggtacttttgtcaaactatgctgaacaactggtcctgatcgccaatctggaaaacaggcagtgtgcccaggcccccacacccacaaagaaaaacatttttaaaaggtccatgatggtcagactgaattgtgtgtcatcactgttggggcactggcttgggaaaacagggaggatagtacacaggtaggggaaagacacaggaagagaagtcttcccagtgagcatgcccaccttcacctctggccttcctcatactccgtgtggtttgtcaagacttaagcttttttttttttttctaaagggtaagttggggctaaagaaaaaaatatcctatcatagaagcttccccatcttacctggggaatgcagagggaatggggctggggatgagtagaatggggggctgggctaggcaggacaggtacccagagtcctgtccgtcagcaggatgagaccaacaggggaactttgctcaaacagtcattccagctgtgatgagaccacttcctccctccagaaaaatacacgaagactcaaaggtttgcacagcaagaagggaaaggggtaactgcagccaccggcatgtactgccctcacccaccctggcctgggcccagccactagaagtgggcaacacaaagcaatcggtggccagctctagtttaccaactgacctggtcatctctcccgttgctcaaaacatgcagcatctccaaagcacttcttccccaattaccatgttcacacatcctcctcccaaaaacaaccaatatcacaaataacatatatccgcacgcttcctctttccttgccccaaatatttgggtaacccagttctccatgtctgactgtaaatggcctgaggacaatcctttgtaaccacctaagagtttaaaacacaacgaggaaggagatactaggatgagattgttggcactactgggctatattcaagaactgagagcttttcgctccatcttctactctgtgaagaagcctcaagatagcatgcccggctatctagacagcaggtgtcccaggcttgctgcctagatctgaagctggcttgcaatgggcagggccctggtctcctctcagggattcagaggaaggagctgcttagcctgaaccataactgcagctgctgacctcattgcaaggcatgccctgggaatgccagggctgctggctcttggtggagggaggttaggcaagtaggacagtagtagtgagtgcccaccagtgagggaggatgaagcagaaaataactactatattggtatgactagaagagaaagggcaaaaggtaagggcagcggtaggaacagccccaccctcagcttagggcaattgggaaaaggttctggcatcagtcttttttttttttttttttttttgacacagagtctcgctctgttgccaggctggagtgcagtggcatgatctcggtttactgcaacctctgcctccgggttcaagcgattctcctgtctcagtctcccgagtagctgggactacagatgtgagtcaccatgcccagctaatttttgtatttttagtagagatggggtttcaccatgttggccaggatggtctcgacctcctgaccttgtgatctgcccacctcggcctcccaaagtgctgggattacaggcgtgagccaccatgcctggccatattagtccatttttaacagcttaaaagctttcaaggactttggtagatcctgccaccctcccttccctcttcccctctccagacaccttcatgtcttcccagtcaaacctctccttcctctccagtcctttctgggtgatatcccagtactcaataggaaaggaacaccagttacttaggaatatgtcaggtgagcctcagacctccacagtgtaataccagtgttgaagagggtagcttggaccaggcccgggggcttaagcaggaatttgaatggagcccaaaacctagaagcagcaaattcccagaagaccaggaatgaaagatgggtagagtgcatattttggtttggatgcctaggttgatcagcattctccacctcctgactgcggccacaatattgacaggttgctaagagttcctcgagggctggagcccatcccagggaaagaggaaagctgcatggcttggccttgccagacccacggaggctcatcgctgacctctgtcttgctgtggcaagaagcccagacttgttatataaaagatctggcctacagctggagcctgagcaaaaacacacagcctagggcccatgcctctaaactcagccagggaacatctgaggccaaccctgccttcagttgacaaagagaaagctatctgaggagtgggatggtgacttcctagaaggctgaaagcaggaaatgacagaggcagaaataggtgggctacacagaagcctgccatctgacaaacagggatgcaataatgagcttacacactcaaaggaatctcaagtcctgttcctccaggaagccctccttgactacaaacatatttgaactaagcactcctatcaaaagacaaagttatgtgtgctcccaggcctgtgaggaggaagcataatttatcctacttgccttttccaaaggataaagggaatggcagtgcccagggctcccaggaaggaagcctactctctctccttcctggagggtattctcctttcacagtctatttgtagatccaaagagggccatgattttaactgcagcaaattcttgttgattcaaggtggggtattcccatgagaattccccttctttaaactttgccagatatttggctccatctcatcccttggctgtctgtttactggccctcatagaactggaatccagactcatggaggccaaatcttgtcctcatttccttattcttcattccaacatgccaagaacagtactgggcattcaaacattcactaacaacatttgaaaatggatcgcattaacaaaataaataaaggaaagaaactgacatgatgtggtcagaagaggtaccaagcactttcatgtgtcatttggccatcatgccacctacacagaggcagaccacgcactctccacccagtttgcaaaggaagagctgacttgcccaatgtcccccagggtgaagggctgactcggaccctcatgtcctagccaccctgtttctgcctatctcgaaataactcatttgctctgaagatgaacaagagtgcgtttaaactgcatcaaaagggagatttgactcttaacaacttagctgctaagaatgaagtcctgaatcagattaagaaatgtctgtataatttcacatatgagatacgttcgtgctagcttatccaaaaattggtaaatgaactggatgatctgcagagattctttccgagcttgggattcttaatgaaaagactgtcttaatgaaaatactgaaggagaggaagctggctccccagtccttgaatgggtacactgaaatcccagtcggggctgctggcaaggaagaattctccattatctgagaacttcccattcctatggctccagtgggatctattctggctcagcatactttttggccacttctttgggaaatacaaactcaatagaatgttggccttggtttaattttagcaaggtaaatctcattttttattttttttatttttttgagatggagtcttgctctgtcacccaggatggaatgcaatggcgtgatctcagctcactgcaacctctccctccaaggttcaagcgattctcccgcctcagcctcccaagtagctgggactgcaggcacccaccaccacgcccagctaatttttgtatttttagtagagacggggtttcaccatgttagccaggctggtttcaaactcttgacctcaggtgatccgcctgcctaggcctccaaaagtgctgagattataggcgtgagccactgcgcccagcctaaatctcattttttaaaaagctagaataaactctaaagtcagctgttgattaccccgacacaaatactcaaagctaaactgaaaaacccagattgacttctctcttccaccaggcaggtggaatgcaaactcatttccatataagtttacaaagaaaaacggtggtaaattagcagggcgtggtagcaggcacctgtaatcccagccacttgggaggatgaggcacgagaatcacttgaacccgggaggcagaggttgcagtgagccaagatcgcaccactgcactccagcctgggtgacaaaaggaaactctgtcttaagaagataaaacattacatggataatatgtacgaccaaaacccaagacaaatcatcgcaatgacttgaggaagaccaaaggcctcctcagccagctctcccgccccatccttatcccttatcccatcaggagagagcttcattacctgggtggccttgtcattggtgcagcaggtgaaggccccatcagcatctcgtggccactggcccagaaggtaggagctgaggatggtgtccagggagaatgtacgccggacctgaagtggctgaggcctacacactgacttttctggggccaccgagcatgggacgctggctgcaagagaacacagcccgcacgccttgccatcagcatggaggaaggagacgtggcaatcaccttcctcttctaagagatgtggcctgcctgccccgtcttcactcatatccaccactgtcctaaaagaatttgaagcagcctgaaacagcacatatggtctgacaagacctttcctgacctactcagccagcctttatcatgggaaacaatttataccattttactttggacttggatgttactttataaatgtcctctatccttttcctgctcctaatggactatgaaccgtgaactcctagatctccacactgagtttcctgagagcagcactgtttcccatcattaaagataaaactctaagtggataaaaaacaaattttcttccatcttttatctcctgcccttcttcctccctccagcacctttgcagggcttaggcactgcacaaattcatccccttaactgaagacctcctcttcctcttcatacttccttcaggactggttagctccccagggaaccccggtggctgacatactggaactactttcaattatcgaggattgaggaatctagtttacggaaacatccaagttttttggttctctcctctgtctctgacttctgtctaaatgggacaaaaataaagcaattataaatccattcataggccgggtggtggtggctcatgcttgtaatcccagcactttgggaggtgggcagatcacttgaggtcaggagtttgagaccagcctggctaacatggtgaaaccccatctctactaaaaatacaaaaattagccgggcgtggtggagggtgcctgtaatcccagctactcaggaggctgaggcatgagaattggttgaacctgggaggtggaggctgcagtgagccaagatcgcaccactgcactccagcctgggtaacagaggaagactctgtctcaaaaaataaattaaataaataaatccattcatttatttttactttggttaaagctttctagaaggaggtaaaagttgaaactgtggataaaatgtaagggtactggaatcatttggaagttgcaatcatctaagttgaccctgttttccatggccacattcaaaacactctactatcttaagatctatggctgggcgtggtggctcaagcctgtaaccccagcactttgggaggtcgaggcaggtggatcatgagatcaggagattgagactatcctagctaacacggtgaagccgcgtctctactaaaaatacaaaaaaattagccaggcgtggtggcaggcgcctgtagtcccagctactcgggaggctgaggcaggagaatggtgtgaacccaggaggcagtgcttgcagtgagtcgagatcacgccactgctctccagcctggacaacagagcgagactctgtctcaaaaaaaaaaaaaaaaagacctataaaggctgttgcatttaaacagaacaaaacactttcacatctgtagtaatcccttaataattcacatgtatttagcacagcaaaaagaactgggagctgtaggtataaataaacctgaagaactttatattaaaaagacactagggccgggcgcagtggctcacacctgtaatcccagcactttgggaggccgaggcaggcggatcacgaggtcgggagatcgagaccatcctggctaacacagtgaaaccccgtctctaaaaacaaaaaaaaaaattacccgggcttggtggcgagtgcctgtagtcccagctactcgggaggctgaggcaggagaatggtgtgaacctgggaggcagaccttgcagtgagccgagatagcgccactgcagtccagcctgggcgaaagagtgagactccatctcaaaaaataaataaataaaaataaaaattaaaaaaaataaaaagacactaaaaggttggcagttcctcaaaaagtgaaacatagaattaccatatgacccagcagttccactcctaggtatataccaacaaagaaccgaaagcagggacttgaagcatttttcacaatagccaaaaggtgggagcaacccgagcatccacgaatggagaaacggataaacaaatgcagcacatccatactgtggaatactattcagtcttcaaaaggaaggcaattctgacacacactccaatacagatgatgctgagttaagtaagcaagacaaaaggacaaatattctgtttttcttgaggtatctagaataggcaaattcatagggacaaaaaaatagaatagactttaccaagggcttaggaggaggagggggagtaggagttattgtttaatggatacacagtctctgtttgagatgatgaaattcaggttgtggaaatggaccctggttatggttgcacaacattgtaaatgtatgtaatgccagtgaacataagcttttatggttaaaatagtgagtatatattttactacaataaaaaaaaggacactaactgaccaatatggtgaaacctcatctactaaaaatgcaaaaattagccgggcgtggtggtgcacacctgtaatcccagctacttgggaggctgagacaggagaattgcttgaacccgggaagcggaggctgcagtgaggtgagatcacgccactgcactccagcctgggcaacacagcaagactccgtctcaaaaaaaaaaagacactaacaatactacctccactctccaaattcactgaagcatttacatacattttgccatagttgtaatcagtaggaaatatgctatattatgttctgcttggttccacctatttcatataccttttcccatgtattaacaatctacatatttgttattttaaaagactatataatattcctccaggttgatgtacactagtttgcttagccattcttgtatttttgtcttttctttttattttttgagtcagggtctcactgtgttgcccaggctggtcttgaactcctgggctcaagtgatcttcctgccttggcctcccaaagtgctgggattacaggcatgagccaccacacccgacccattcctatatttttgaacatttgagggattcctctccaatttggacatcaaaaatgttactatatggccaacttttactctgtgtttttatctaatccctggcatagttctagatcattctcactcagccatcatatatgtgcttatttaaaacaagtgaataatttataactacaacagtagtaagtgtgaactgtagaaaagtcaggaaatatataaatataaacaaacagaaaaaaaccctcaactctcaacacccagagataaccaatgttatgagaaatataaacttacaggtcttacctcttctgtgtgtgtgtatgtgtgtgtgtatatatacgctttacaatttaaaatgggattatactgtacgtattgttttgttatgtttttaccttataaacatctttccaaatcaatatatattgacataaaacacatcattttaaatgatattaacattcctaggttaaacctcttcaaaggctctctttcttttttttttttttgagacggagtcacgctttgtcgcccaggctggagtgcagtggcacaagctcggcttactgcaagctccgcctcccaggttcacaccattctcctgcctcagcctcccaaataactgggactacaggcacccaccaccatgcccggctaatttttttgtatttttagtagagacagggtttcaccatggtctcgatctcctgacctcgtgatctgcctgcctcagcctcccaaagtgctgggattacatatgtgagccactgcacccggcccaaaggccctctttcaaagacggaggtaaagccttcatgttctggtcccacttacctgtcctttatacctcactcttccttaaggtcactaaatctcagacaaactatactgcataccatttcccacccatgtcccaagccttccctcctctgagattttgcatgggcccagggttaaaatctgttcatctgtcagggccagctttactgcctccactccaccaagccttctgcatccactggaatcccctggaagcaatgtcttagaattttctgtttcctcagtactttgtactcttctagtaatgagcaccttctcttgaggaatagggtatttgtaactcctagataataaacagcctgaggccaagggcaggctctgtgtatcccccacaatgtctaaagcatagggctggcaattggcaggcatctaatatttgaataaaattgaaaaaccttcacaagaagggtcaactggctctacttttaccaggggttctgactttgcatgtgtgttcaacacacccacttggagtaaagatcccatagctgcttgtctttttttctctctctgaggctcaggaaggcccaacctctttcttacccttcctgcaaccttgttgcctagtaagttggtgacaggcacactgggttcaaggcacaactttatctctacaccagcatttcaaagactcattttcctaacctgggtttaaaatcaaaagatagcaatccagatatttctgggagcttctgacccacatcagcagccagctcaggccaaaatgctgtcctacgggcctccaaaactgtctattagagtccagtgacgaggcagggactctggaaagtggatttacaaaattacatgacagataaccaaagaggcagatgggccacggacgagcaagtgattggcataaggggtaggatctcataatcctaaaggctgcttcatcactgtttcgaaggaaaaggagtaggactccaaggctgagggataagtgacaggagaaaggtttcctggagctgcttctcccatgccctcatctgaagtccctgcaaaaatctcttttagattctttccttactgggaccctaaagctatctcgtgtttacgttgtgctttcaagttttgccccatccccacaaagtactttggtgtgctgtaatcttttactctcctgtcagctgtaaaaggggatagggaaagactgttaaggaagactaaggcacaaagaagcttagtctctgattagactccttcactctgtaagtcagcagcagtcccagatctaaatccaagcctccttcctcctaaatcagtcttccaactactcactgaggctcacatccctcttctatcagggacaccctctgaggctgctgggacacctgcctagacacctggaggatgaattgcttttgtattaatagcttctttttagcacctaatggaggagatggcaggcccaatcctattgtctccaatgacctattttttgttttgcttttgtttgtttcttgaggaagcctttgaaacttgaagtaaaggactctattatctcctagggataactttaacccattttatattggtttccatcactcttcatatcctaccctattcaatgaatccaatctctaggacaataatcataggtggtactttgctcccagtactcacagggctggggagcacccaaattcctggaatgtgatgtgagaatccaaccaacgcattttggtaaactctacattctttccggctccctctgaccagttatccattaagactcaggactcagtgggtcctgacttgttcctccatatacaaaaaaatgtcacacaaatagcagaaaagaaataaaaaggggaaaaaaggagggaggggaaaggattgaggagaaaccaaggaacccccaatccagaatctgcagcccctgactccctctcccctggcagatatgcaaggatcttactacatctaaatcaaacaggaggacttgcctcagtttcttttccttaaatgaagagacagctgggcctcagccttatttccacagaggccacatcctggcacagggtgctggcacagcgcctcactggccatgagatgacagaattaccttctgtctcagaacccttagcaaggtccactaccctcccaactctccaaattcttggcatgtcccagctcttttgaggagacgaaaataccatatttcctttaagcctaggaaataagggaggggactttttttaaaaattagattttaatagtttaaaaaaaactaccacttatttcacaaacctcatcgcaagtggtttggtaagcacctgcttctttggacatcaaaattggttaagggctaaaccaaggtgtcaaacttcccccaaatgcaacacaaaccaaagccaaaatgagacaatgacatgtctcgtgccacccttgaaggggctgcaggctggtgcagcatggccaccccagatatctagtaggagctaagaggtggggagggtaggtctgactacagccaacgccacccagcctcactgggctggctctccctctggcctaagttacctctgagggatgttatgaagagatgcaaatacactttaaagccttagttagaaagattatgtcaaatcaattcatgtcctttaggattgaaggtgtaggtgaaggagtccggaaagaggagactacccaaagacgtgcagagtaagccctagcccctctatccgtaggcctacactctcctgggcccctgggaagatgcccatttttaatgtcaaagccctttcctttactagtgacagtctaacccaggaataagtgatgcagggtagaatacaaagctgcttgcagaccggagcatcagcagcttcaggtcaacacttaagttctgctgcccaatgagattgacctcaatagagaacgtcccctaagaaatcttctaggtgagcctagttgagatagaggctcttgggtttatcctccatgggcataccggaaagatctgggcatcgggttctgccctgcacttgtgtgattattgttaaaggagaagcagcattgagaagtcacaacggttgcttgtggttggaagatgaactggtttcatttctggaaagtacccctctcagatttaggaaataggggagggaaatacgacaataggcttccctatcagagaagagaagcccatatcatgacaggccatgacaaagcagcaggctgttggggcactggctgggtggctgcaggagggtggagtgtcctgtttacagcaccgtggggtattatcagcccatcacatgcagcagcctccacagcccaaccacctggtgaagcaccctggcaccaggccaggccatttcaccatgcagctgagcagtggcggatgctttggttcttgagcaacggcaaatggaaaaaacaaaacaaaacagcacacacaggagataagaagccttaggtgctatcttccagagccacttggtcctgtctcacaactgctacactaggatggctttagagagagggagctatgagtggagagggccagcggtcaagtatctgcctgttgggggaaagtcaacatggcagaaggcacacaaacggcagataagacaatgaaccaagagcaaaagatgggcctggcacactgcagcagactgatgcctttggtaagcagattttttttttttttttgagagggagtctcactctgtccctcaggctggagtgcagtggcgcgatctcggcgctcattgcaagctccgcctcccgggttcacgccattctcctgcctcagcctcccgagtagctgggactacaggcgcccaccaccgcgcccggctaattttttgtatttttagtagagacggggtttcaccgtgttagccaggatggtcttgatcttctgaccttgtgatccgcccaccttgtcctcccaaagtgctgggattacaggcgtgagccactgcacccagcctggtaagcagattttgagcactcactacgagccatctgtctgtgataaacactggaggagtaagacaagaacctgctgatgagattgaagtgagcaaggctgatgcaaattctctctaagtgccaggctaccaggcaagacccccaggggatactcccccaggaaatgctttttcagaaggaccaccaatttgtctctgctattcccaatatcccttgctgaaaatcagctcaggcctggccacaccagcatatctccccaacaggtacctaaaggagaagggtgacagctcttagaagaagggcaggaatggcattagaggaaagacagtagataatgcaggaactgaggcattgtggctgctcttctcagcgtgaccagagatagactgtggggtagaggcttagcactttacaaggggaaacaagcccctgaccagtgggttctgggcatctaggggacgtgctccacttatttcactatctttggggtgatataggagagaaaagcctgtgaaataaagacagggctactctccacccatcgtagttatcccaaaatacccaagaaggactacagaaggaaaatgagagaggcagccaacgagatcttacacatggcaaaaactcaacaactagctggttcaacaaacaagttatgagtcattttctcatggcatcaagacttgaagcattattagcactagtcttctcatttcccctgttttttgtttttatttttgattttttgatctcacctctccccttaaagagaaaataacttataacagaaactatgcacatgttagaagaagaaaatgcagataaacaaaaactgaaaatgaccaactatgcatgcccgcactcagagatcaccactttgctcaccaatcctgatctctctccatgcacgagcctgcatatgtatttttagtaaaatgaggtcatattatacatgcttttctacaacctgttttttttcagtcagtgatcttcacttaaggaggagaagcaggcagggtcagagcagtgtggttagacacaggaggaacagatcctgtcctgtcctgtcctagttgtgatacagcatttctgttagagggaaatgttaatctggagttagaagagcaaagtaaaacaggaattcagaatttctaaacatttccccaataacaggtttgcagtaagcacgggaagttcctcctagcagcctcacagggattatttttctatttcagcacatttgttgggattaaacagggcaggccgtcttctgagctccctgtggtccagtgctgcttaactgcttaactagggatgggtgggttttgtggggaagttgtggcgaaactgaaatttccaatatgactgtacaagagttagaagccctccttggaaagcccaaggagaccccatccatcccagctgaaaaaattaaatctggagctgcaaacacttctttaaacaacacttctttcaatagctatccttaacaggtagaagaaactaaagaaactacattagaaagaaagaagaaaaatgataatatcccatgttatccctaccaataagactaccccaaatgaaaaaaggagcgacgatatttgtacacacatgaaaaacttctcagccaggctctcaattaattactgactccatatttaagtgtacagcttaagtgagagccactgaaagcatttctggctgtgtgtccgacttcccaagatgcagaccatatctgtaggcagctggagagacaggccaagagaaacccttctggagatgtcattgtgggaaaaaaaataaggaatacattggctctttgtaacagtaaggagaaaaagggtgaacccaaagtctatgtgtgtatataaaaagagtagacagcagttacttagacatttgttcaattcttaagctgcagttagaagaaaaggaagtggtgtgaacttttcaccttttatctgaattctctgaagaggagttctgcaggatttcaacatccttaaaacaaaacactagcagttactgattggaacatactttcctttgggatctacatggcctttgcaagaatagcataaatagcacatagcctagcccctatctctaaaaaaaaaaatccttactccatggttatttgggagtgatgggtttctggagggctgttttaaactcaaaggacaggcataaaccctttgaatcttcacttctcacaggaatctgatttccatcaagtaggaaagaaatcatgaagcccagtcagctcttaggtagtgttttaagtaaggtgaaggaaaaacaaacattagggaagttcaaagacaaaaaatcctacaagaggacaaccatgattgaaactgtactctgatttctgttatgggtatgtgcacccccacaagctcatgaattctcttatggaagagagggctgagcttccaaggtgatgcagggcctatgacacacccccatgtagacaggtgaactgatttctccaaggtcatagaaaaaactgagaccttttattacccaaacagaagatttctgaaagtacatttcctaccctgtgttttgttatcagactcaactatgtcatgacctcctggcacccttggttcaggaactactccgtgggttggaagggtctattcctttcccttgctagaaaccaggatgatcacacctgggtctcaggaacactagtatacccattgggcatgttgggtgggccaaggtaggaagagaacaatttaaaaatcagggattggccaggagtggtggttcctaccagtaagtccagaactttgggaggccaaggcaggagaatcacttgagtccaggagcttgagaccgacctgggcaacatagcgagactccacctccaaaaaaaagaaaaaaaaggccaggcacagtggctcacgcctgtaatcccagcactctgggaggctgaggcgggcggatcacgaggtcaggagatgaagaccatcctggctaacacagtgaaaccccgtctctactaaaataccaaaacattagctgggcatggtggcgggtgcctgtagtcccagctacttgggaggctgaggcaggagaatggcatgaacccgggaggtggagcttgcagtgagccgagatcgtgccactgcactccagcctgggcaacagagtgagactctgtctcaaaaaaataaaaaaataaaaaataaaaacaaaaaagaaaaaatgttttattagctagcatggtggcacgacatgcctgttagtcccagctacttgggaggctgaggttgagaggactgcttgagcccgagaggttgaggctgcagtgagctatgattgtgccactacactccagcctgggtgacagtgagaccctgtcttaaaaaaaaaaaggttggggggggcgtcccttttccagtgaggaaggtagaaagcaagtgaaagaaggaaaaggaaatcagaacaggattagagataactttcggataatcaaaataatttctgctttatgaacaaaccatgacttatttttggctccattcagcttgccttctccctaacttaaaacaaactgccagacagcagcatacagtcatcactcggtatccatgggggattggtttcaggacctcctgcagataccaaaagctatggatgctcaagtccctcatataaaatagtgtagtattttcatatgacctatgcacatcctcccgaatactttattatttgtttatttatttttcttttgattcaggtttttgctctgttgcccaggctggagtacagtggcatgatcatagttcattgcaacctcaaactcctgggctcaagtgattctccatccttggccttgcaaagtgctgggattacaggcatgacccacctcagcctcccgggtagctgggacaacaggtgagaactactttgcctagctaatttctaaattttttgtaaagacaggatctccctatgttgcctaggctggtcttgaactcctgggctcaagcgattctcctgccttggcctcccaaagtgctgggattataggtgtgagtcaccttgcctggcctccctgcaatcccacactttctctctagattacttataatacctaatataatgtaaatgctatataaatagttgtcgtactgtattatttaagaaataatgacaagacaagaaaccaggcatggtggctcacacctgtcatcccagcactttgggagactggggcaggaggatcacttgagcccaggagtttgagaccagcctgtgcaatataaagagaccagatctctacaaaaaatttaaacaattttaaaatttggtggtatgtgcctgtaggcccaactactctggaggctgaggtgtgaagattgcttgagccaaggaagtcaaagctgcagtgagctgtgatcgcatcactgcactccagcctgggagacagagcgagactctgtctcaaaaaaaaaaaaaaaaaaaacacacacacacacaagaaaaaataagtctgtacaattttttccaagtatttttaatactcagttggtagaactcacagatacagaacccacagatacagagggctgatggtatatgttttagcaactgatactcaagttaaaaacctacaaacgttgacagaatttgatggccccattttgttgccttccctccagtgatttcaaaggccaaaagacaattttttggttattcttcttttgaactgctcatgtcaacactcacatctattagtgttaattcagaactggctttatgcaactcccagagtaatatctctatcaggaagagttgtcaacagatgccaacaccactgggccaaaggtcatagggaacagaagatttatataatcccaaagtattatccagaaaccacttacaaagagaataatgtacttttatagcctgggggctaccataccacctcaagtgatccaactgagcctgactagcagtggacattctggcattatgtatctcctaaagtgacattttatgaagtacatagctttatccatgagatgttcttgtcagaaatgtttaacctgaatctaatcaggccccagatctaacttcccatttacaggaaatacaggggatagaggagcaagttagataccaccatgaggaaacagaaaaatccagtgtgggacaaccagagacaattgacatgttttcaaaatgttagtctcaaaaaacaaatacagcaaaacaaagaaacaggaatgggaagtagttccagattgagagacttttaaaacagacataaccaaaaggggactttggctgggttctgatcaaaaacaaaagagccatcaaaggggaaatttgaaaatggactaaatgacatctctagtccatttttgcctttggcaaagccacaattacttttgtaccaacctcatagatgatgtcatttcattaggtataatgatggtattatgattatggagaaggatgtttttattctcaggagatgccactgttatgaagtgacaaatgtcatgatatttgcaacttactgtcaaattgtgcacccaaaaaagtgcatatggatgtatatatgtgcatatgtgggtatgtctagacacacatatacataaacagaaggagaaaagagagataagaccattgtggcaaaagttatcaatgagtctaggtgaaagataaataggtagacattgtgcttctaacttttctgtaggtttgaaattttccaaaataaagttgtaagaaaaaaaaaatactggcttcatttaggaagacaaattcaaatcactcctcagaaaggacctaaaccctttagcatttcaacattggcaggttatagccaaattcaactgggtcactagacttctaatttgggggactgaaggtaggcaaggaataaaagcatggataaggctgaggcaaggaactgaaactcacaagatgtaagttaatgcaaggtagaatcaagatactaagtgaaagagacactaaactaaattaagaagtgtcatgtcatcccaggagcaagaccaagactataggcagaattaagagcttcctataagtccagaaacatggctggagtgggatataacctcagatatacacagccaagtggcccctcggcatccatttgtcatgattgctcttcaaaaggaatgcagaaaccagagagatcccagagacagaggtaaaaacagctaaacggagggtagcttgatcccaagggggaaggaaaatgaattagaatttatcggtagtcttccttgcaggtgcaaacatgaaggacagtaaaaaggctttagttagaataagagggagtctagctagatagataaaaggttgaatgagggtggctagaatccgcctctgaacagccccaggaagagatcattacacgtccccagctgtctcagttatttacccttgaagacaggaaactgtacgcagatgagtttgggcctcctctagttctagaattccccaactattaaagggtaaataagagatggctactgatcaatcagctaaattgaaagctcagaacccatgctattacttggggcaagataagtagaaaaaaaaaaaggcacaaattcaaaggaagatttgccttacctaggctgatcaaacagctgtgttgtgggctcccagatgatctctcccacctcctctaccacacaggagaatataaatagcactcagtttacctgtggctagccacaagcagaagtctggtcacatgactgggcaagctgggagtaaccatcaagtagacatgaacactcagagggcaggtttgctctctcgctacagctcactaggttggactctgtcaggaccctctgctcctaaccctgactgattcattttgctctgggctatggggaggaagttggggggcacttataaggaactattcaagttcctcagggctagaaaggtcacagtaatagaatttgctctgccttcaggatcaaagatcctagtagagttgttcttctctaccccccgcatccttgaaaatctgtgtgaaccatctcaacccacttgcagaaagtcttctctgatcatctccaactccttagtcaagctctatctacttcatgcccccagcttcaaaaaggggagataccttagagaccacaacatcccatctagtggttccctgcccgggccctgatattttggaacaaacctcaaatcagtggcaaattcccatgctgagctctagctgtgaaagaaccccaaagtgcactgggcaacattccagggcagaccttgttttgaagccctggtcttgctggttgttcagatttcctaagggaagctcaaaggttatgtagtgcctccagggtaaacctagtctgaaaagcaagattagatggcccttccagaaagagtgttgaagatatcacattggaaagattcctcctaccctcaatatatgctgacagcttcatatcagaaggatacttatgaggtcgcctctcctgtgcttccagatgcagaggagtgggtggcaacaccactggaaggtaagttatagcctcttcccctgtatatgatgggctttagatctgttctgaaatcagggatgcttaacagtaatgtcaccttcttttatacttaagtaaaaaggcttaacctcatgaagcaaaaaattgatccagggaaacattggtacattaattaccaataagtcctaaccaaacctccaagaactagaaggtccaggctcagttatgatggtcctctctgagcagacagcattgccatttgcacagcagctccaacacacacctctaagcttcagacaacccaacaggaatttgagggcagcctcttcgcatcctcctgcatcttgccctgattctggttggccactaccggaaacttacgttagaggaggaaagagcctgaggaatcaagagaatggtgggggcagtgtgtataacttcatcactgcctaaggacaaaaaatctaagtatataagctggggtaacaatatagtaagtgctcatggatctatttcatacaactagctgggcccctgaaaaaaaatattttgatgacaacttaaccatggtcaggattaattaagtctaaggtacctacaggtaggcatttcagataaaggatgcactctaaaactaaagattttcaggaaaatgttttctctatgttaagaatttgagtgggacacattcattcacttacccccaactctgacagctgggggaaaacatcagtaagcaaaaatgacaagaataattcaagggccttcaaggagtacaaacaggtgcataacatgtggtttggtgtgagaggaaaggggccggcacacaagcggcagtgtctgaacctctagctctgtctgcttagcaatgattaccagatccacccctccttgggccctgtggttaatgaaaggttttcactgactaaaaatgagccatctctttgtgcatgaagttgtaactcctgacctacttgatacaatgtgctgcactgaaccacgcaacctgctcactcacaaggcggtgggtacaaacaatcgactggtacgtagcagaagaaagctctctggcctaggcgtatacctggcatcactttgtaaaccaaacccactcctttttccctcagatctcgactatatatatatgaggtaatagtccctcatggctctggtgcagcagggccttccattttcatgtattttaagaaatgaaggccaggcgcagtggctcacacctgtaatcccagcactttgggaggcaaggtgggcggatcacaaggtcaggagatcaagaccatcctggccaacatggtgaaaccccatctctactaaaatacacaaaaaattagccgggcatggtggcacgcgcctgtagtcccagctactcgagaggctgaggcaggagaatcgcctgaatctgggaggcagaagttgcagtgagccgagatcgcgccactgtactctagcctggtgacagagcaagactccgtctcaaaaaaaaaaaaaaaaaaaaaaaatggagattgttgagggcagaacacagtgagagtgtttcttagtctaaggaagcactttctctagaaagttcctggccatcctgaatatgctcagtgtgcttcagcatatatatagctgcaaccctgctgactccactgctgggtcaatgtgaggcgtggactgggctgggacacacggcagtgggcacccaatcagctctcagaatctgatgccaacctggtccagctagagtagtaaggaccagctatggtctcctaagaggtggcctactataacggtcaatacctgggctcacatcctgcttccaccccaatgtgctatgtgaactcagactgatcacttaacttctctgggtgtcagttgttccatctgttaaatggggagagtaagatatgttatcaggatgtagaagaaaatttccattccagagaactcctagtgcagtcaaattagtctcacatatatccatgtgttaagtatcttctttggaaataacttcaaatttatagatgcaagaataagaacagtacatagaacactcatataatctttacacagattcgcctattaacagctgccccatttgctttactgtttgctttcttcacatgcactttttcttacacatgctcaaacacgcccacatgtccacacgcaagacagatactcacatgcagacacacacacacacactttccttcattgagtttccttgtgtggtgttctatttgaaaagaacagggaactactggaggaggggaggatcaagatgaagagaaagcgaaggaggcatgctatttggtgatggttccacagctctgttcctttttctttgccaacaatgcaaacagcaagcactcaggtgttcctgctttagagatgagctattactggccgggcatggtggctcacgcctgtaatcccagcactttgggaggccaaggcaggcagatcacctgaggtcaggagttcgagaccagcctggccaacatggtgaaaccccccatctctactaaaaatacaaaaattagcccggcatggtggcaggcacctgtaattcagctacttgggaggctgagacaggagcatcgcttgaacccaggaggcagaggtttcagtgagccaagattgtgccactgcactccagcctgggcaacaagagcaaaactccatctcaaaaaaagatgagctattacacgaacaggtaccagaaaaagtgcttggtatataagattattagttactacttttttaaaaacaacaaaccccacaaaaaacaacaaagcatttatatgaaccatggaaacagctttatcatacagaagcatttttgtaatatttgttgtaatgggattttaccttgtgaagttgggaaataagtaggaaagaaaggtttcggctgggtacaatggcgcacgcctataatcccagcactttggggggccgaggcaggcggatcacctgaggtcaggagtttaaaaccagcctggccaacatggcaaaaccctgtctctactaaaagcacaaaaattagcctggtgtggtggtgtgtgcctgtaatcccagctacttgggaggctgaggcagaagaatcgcttgaacccaggaggcggaagttgcagtgaggtgagaccacgccattgcactcagtctgggcaacaagagcaaaatctgtctccaaaaaaaaaaaaaaaaaaaagccgggcgcgctggctcacacctgtaatcccaacactttgggaggcccaggcaggtggatcacgaggtcaagagatcgagaccatcctggtcaacatggtgaaaccccatttctactaagaaatacaaaaattagctgggcatggtggcatgcgcctgtggtcccagctactcgggaggctgaggcaggagaatcgcttgaaccagggaggcagaggttgcagtgagacgagattgcaccactatactccagcctggcaacagagtgagactcggtctcaaaaataaataaataaataaataaacaaacaagaaagaaaggtttcacacagcatatggttattagaatattaaagacttctgggccacgcacagtggctcacgtctgtaatcccagcacttggggaggctgaggtgggcagatcacaaggtcaggagtttgagaccagcctggccaataatggtgaaaccctgtctctactaaaaatacaaaaaaattagccggcatggtggcgggtgtctgtaatcccagctactcaggaggctgaggcaggagaattgcttgaacccgggagatggaggttgcagtgagccaagattgcaccactgcactccagtctgggcaacagagtgagactccatctcaaaaaaaaaaaaaaaaaaaaaagacttctaggccagatgcaatggctcacgcctgcaatcccagcactttgggaggctgaggcaggaggatcacttgagcccaggagtttgagaccagcctgagcaacatagtgagatcccatctctattaaaaaaaaaaattctatacagagtatgctttggaggtaagagtggcttgtaatctacttgggagggttagataacctccaagaagtcaattatccgtgatacatagtccctagatggagctttctcccagagtttaaggccttgctatttcccttactgggcacatgcctgtctcggaagagcactatcatacattacaatgactccactttcagttaacctaaagctaggagagggagacatgctcagacagatcctgcgccccccaggcttctttcccactagaagtagggggatggttacaccaggggtcccttacagagaggactaagctattatggcacaatgccacttgcatctacccccacccctgccataggaacgcatcacccacatgtattcccaggtgcttttctgggtttcacatcatcacacataagaatccttttcctgtaagatccatcttcgcatgtctccctaacatggccttgccccaagctcagtaaccatgaccaccccacagaggcagaaaaatctggtctgcctcctatgtcctatctgtccctggttagccactcattctacatggaaatggcatatctcaaaccagctggaaacactcaaaagccgccaccatatcacacacataataatgtattaatagtaaccatcatcttccaactactcacaccaagtgagtatttatggtgtggatagtcaccttggggtgctaaaggaagaaacggacttctttgcagcccagtttccaattctttttttttttttttgagacagagtctcactatgtcacccaggctggagggcagtggtgcagtcttagctcactgcaaccttcgcctctggactcaagtgattcccctaccttagccttccgagtagctgggactaaaggaaggtgtcaccacaccctgctaatttttgtagttttagtagagatggggtttcaccatgttggccaggctagtctcaaactcctgacctcaagtgatctgcccgcctcggcctcccaaagtgctgggattacaggtgtgagccaccacacccggccccaattctcttttgcttagcttaacaaatgaatctttgctcctggaatacaggtatataaacatagaagaaacaaatgctggaggtgtgctgggcaggtggcagtggatgccagcctgagacaaaattcacaacggactttttctgcatatgtgggaaatgccctttgcctaattaagcaaaaggggtttattagtcatttggtgttggacaagaacttcctttctgggcctcagtttccttatctgcaaaaacaatgaaatgccacctgcacctgcaggactgttgtgaagatgcacgaaaacatttgagagttcccatcagaagcaccacagagctaaacaaatggaacatattgtcaaaactaatgaaggccaggcacggtggctcacgcctgtaatcccagcactttgggaggctggggcggttggaccacctgaggtcaggagttcgagaccagcctggccaacatggtgaaaccccgtttctatcacaaataaaaaaattagctacttgggaggctgaggcaggagaatcacttgaacctgggaggtggaggttgcagtcagcagagattgtgccactgcactccagcctgggtaacagagtgagactctgtctcaaaaacaaacaaacaaacaaacaaaaaacctaatgctatctatattctccatttccctgaaaaatacaggtgaatttttgggcctcttagagttgagattcagagactctttctttctacagaagcaactgtttttgtcttcctctgtgaacacggaactactccagattccaataagaaagagtccagatgctgctctcagcattaagatgtgcacaccccccatggatgtggttcacatagcccttctctccccagttgctaaatccagactatgtcatattgtgaaagccctctggctgcatcccctctatcatgccaaatgctatccactcccaccccaaccccacccctggcttatgtcatatctgatgggcaggagttaagaagacaatccccaaacaggggctgtgtggcaagttttccaccagcctgcagctgtggggcagggagtgcacgtgttatcaggagtggttttcccaaagccacgtgggcgaccagacatgcacagagcacagcaaactctttttttttttttcgagatggagtctcgctctgtcacccaggctggagtgtagtggcgccatctcggcgcactgcaagctctgtctcccgggttcacaccattctcctgcctcagcctcccaagtagctgggactacaggagcccaccaccacgcccggctaattttttgtatttttagtagagacagggtttcactgtgttagccatgatggtctcgatctcctgacgtcatgatccacccgcctcagcctcccaaagtgctaggattacaggcgtgagccaccgtgcccggccaagcacagcaaactcttaaagggaagggagtgtggggtagagaggagaagaaggggagggaagaggggataagagaagctgcctatgctcccaatcacattttcactctgttcaaacttacacccagctgggcaggttaaaacagccgttttcggccaggtgcagtggctcacacctgtaatcccagccctttgggaggccaaggcgggtggattacctgaggtcgggagttcgagaccagcctgaccaacatgcagaaaccccatctctactaaaaatacaaaaatagctgggcatggtggtacatgcctgtaatcccagctactcgagaggctgaggcaggagaatcgcttgaacccgggaggtggaggttgtggtgagccgagatcgcaccattgcactccagcctgggcaacaaaagtgaaactccgtctcaaaaaaaaaaaaaaaaaaaaaagccattttcactaagccaccagacacatggttggcagccttcaaggcaaggaacacagactctgtggacaacagtgtaagtgtccagggcctgcgaagtggtaacaagcatctctttcttgcacttccctatctggtggttggtgggagaagaaatagcagtgcctgctatcacaggatggtggctggcttgggagaggggcgctttcagcctgatcacacctctgaagccatcctagggccaacagataattctcctccttggcctagaaaagccactgatccagattttgttttcctccatcttcttgctacacagaacactactaggaagttggcaaaaatctacctggagtgaaaagacagttagcattcatcttggtctccttggcctctcaccatatccacttcaaagcctaaagccaggcagtctggctttttaacaaaatcataacaaaatcctacacattggctgtttccatggatcgacctggtaactgcccaagctcaccctctagctataagtgtgttgggaaaagaacctacaggcctagcaatgacatctatggaaatgccacgtctttgccaccaactgggcttcaagcccaatgaccaggatgaataggagaccagtgatttaaagaaagagagaatactaacacttcggggggttttgccttgtaagtagctgaagagaggtattatagagggggaacagtatgtggggaccagaagtgggaaagaccattctgagtgagcctgggggaggtgtggcttactctccccactctgctgccttcccagcaactcaatccaacaagtatttattgagcatgacactccccatctgccctggtcctccctctgcaaaaacactcaaatctgttcaagctgcagggtgagttccattgcacttgaacttgaaacgtgaggtgcctactcttaaaaaggcaggcacacaatttccagtatacggcagaagggactcaagaggtttgagaaaaataaggaatatagctgactagacaaggcgaaacaatgtcacttttgaaagggaaaggaaaggagagagtaaaaacttaatttaaccttagggagaataatatattgacactttttttttaaagcctattcaaaacatcccagtagttttctctaattaacctcaccaaacactgagtatttcttcattctttgcctactccagcttgaatttatattttattcacttatggatgtgttagcaatctacttttagagttgcacattaatccttcctttgacctttgaggaggtaataccttggtgctctcctgcatgtcttcatttaggatcagataataagagactcaagtggcagagctcggggtgaactaggctgccccctaacaaacatggcttccctggaaaagtgatccttcatttacaagatagagagttcagagtcagaaaggaggcaccccgtggatggcttgagcccaggatgctatagtgagctatgatggcattactggattccaacctgggtgatgaagcaagaccccatctctcaaaaaaaaaaaaaaagagacaaaggccaggcgtggtggttcacacctgtaatcgcagcactttgggaggccaaggcagggggatcacttgaggtcaggagttcgagaccagactggccaacatggtaaaaccctatctctactaaaaatacagcaattatctgggcgtggtggcacacttgtgtagtcccagctatttgcgaggctgaggcaggagaattgcttgaacccagagaggtggaggtttcagtgagctgagatcacgccactgcactccagcttgagctatagaatgagactctgcctcaaaaaaaaaaaaaaaaaagagagagagaaagaggaggcaccccaaacctacagctttgttctgtcaaataccatccatcctctaagaagccacattcagacagtctctgagagaaaactcctcaacccttgatcacaggccagctgcttcagagcaaccaaaaccctccgagtcttcccaggcctcccccagcctccaccccttttattggggagctgggagctcaaactgctaatgtgtaggcagagctgagctaaaggcactccatctgtcctccacccccccagcaactctcgggggctcctgagcaaatccacaaacctgtatgcctgagcagggcagggtaaatgtctgtacatggcctggacttcagttccaggtcccccagggcctggacttgaagtttttctattatgaaatacttggatagcattcttttaagttcattaaagccacccttgattagctgcagtgctcccacacagtaagggtcgatcaaggcatatgtgggcctgaggggaagcatttaaatgactgcaaggcttggcattcagctttgtagtgaccctgaggggaaagcacagtgccaggcagagttttccaaaccaggaggtttggtggggaccacaagctgagcccgaacactagcagccagctgttacgagaacctcccaccatccagctgttgccaacaacaacggccccttcatgagctccacacgactggagaaaatgggggcacagataacttagaaatttcaaatatcatccacaactcttccctgagatcaggatttgtttttgacctaataatgtgagtagatttggctaatgtttggttaattcataccctgcaaaccaaataatggagccctctgtgaagattgaacctagacgaaggggggaaactgaccagatttcccacccatcctttctttgcttccactcttccctgttcccacttctgtgacaaagaagggtaacatgcatctcaaaggatggcagagcttactaacccaagaagagactgtccactctcactaactcactctctagtgagcatctacctttgctctgaactgggagcgacacccaaagttttcctttccactgctttaaaagggctccagggccaggtgtggtggctcacgcctgtaatcccagcactttgggtggccaaggcaggtggatcacctgaggtcagatgttggagaccagcctggccaacatggtgaaacccccgtctctaataaaaatacaaaaaaattagctgggcatggtggtgcgtgcctgtaatcccagctacttgggaagctgaggcaggagaagcgcttgaatctgaaggtggaggttgccatgagccgagatcatgccattgcactccagcctgggtgacagagtgagagtccgtctccaaaaaataaataggccgggtgcggtggctcacgcctgtaatcccagcactttgggaggctgaggcgggtggatcacaaggtcaggagtttgagaccagcctggccaatatggtgaaaccccgtctctactaaaaatacaaaaattagccgggtatggtggtgggcacctgtggtcccagctacttgggaggctgaggcaggagaactgcttgaacctgggaggcggaggttgcagtgagccgagatcgtgccattgcgctccatcctgggtgacaaagcgagactgtctcaaaaaaaaaaaaaaataaaataaataaataaataaataaataaataaataaataaataaaataaaagggctccaaactgtctgtggagtaacggtaagcccaggcaggtctagtcagaacacttgagctagagtcaaacgtgatagtgtcagtaagaactccataaccagacctgcccctcagaagatgccacacccaaaagcctgaatcctttagcaggaaggctctatgtgagtcatctaagaatctggaggaagatgctctaacagttcttctaagatcaaggaatagtgtggccctgatgcccatcacaccattcaaaataaactgaattcagcagaaaataaaggcatagtgttctcttggctattaaagcccaccaaccactgtggtaacacccaaattagcaccatcactatgaaagttttgcattactgcttgcaactttctaaagatctatctatgtctagaatgtgagagaacaaagtcctcttgccatcacagcccactgttgttctcacccctctgacactgacctcaaatggtttaagatctcttagctctatgttatataagtgagaccttctcgtactatataatcctttgctatccaaaataccgaagaacacatggactcacactcctttgggtaccaaagagataaagcagttaagcagctagtccccaaattcaaggatgtcatcactggtgataacatttaagagccagatgcttcagcagtgcattttgctgaccatgtatgtgcctggtgctggcaaagctgtcaaaagcaacagttagcagtgttgggctaggaagtgtctggtgttttaatgcttcccaaacagaagctgcctcaatcacaggttttagaaggggaattgtagctcttaaagggttttaactgcacccccaggcctcattatagcaagatgatgccttggcatagaacggttggaaatctcttctaatctccaggctgtttctggcaccagtagccacacggaccagtttgctgagggctttctcttagggtctctaatatgcaacctcctttttatggttccagacctatctaaacacctatcccccaagaaataagttttcaaagcattgcaaagaaaggagtttaacaatttaataatataagcactgcagcctcgtattcacgaaacagccatcctggggaacctaatcgacatttgatataaattacccttcttatatccccatggggaagccaatattttagggcaaccatgactactgccagctcttcataatctgttcacaaaaataaaaggtaatgagaaaaattcaaaacaggagataagcctaaagtaatttccatctgattttgaaatgtgttcaccgcagttttgggttgtcaggttgggggaaatgggttaagagaggagagggggcaaatttgcctaacagttaagcttttatataaattcaaattagcttatgtctactgaacacatcacctgacaatggtgggggtggagaggctggattcacacatgatgatgttctacaaagattgagaactgactggaagcaggtgaccttcttttcttttgccttaaaatagagtgggactacaggcttgttcgttttctttacccccttagaattttctgaggtttatattacacacatttgaaactgatctttatataggaaaaacaggtacactgtttgagacaagagttggcaaacttttctgtaaagtgacatatagtaaatattttaggctttgtgagccctacagtctttatcacaactcttcactccaccaccgacagcacaaaagcagccctagacaatatttaaatgaagcagtgtggctggttccaataaaactttatttacaaaaataggcccagggccagatatggcctgtagaccataactgccaatccctggttaaagaaggttctggtggtcagaggaggttccaaggcagtatttagcttccctagcacccagctggtcccagtggggctggtccactggagaaataatttgcaaacctagatgaaacattatcttcattttagggacatacagacagacacgctaaacaagataggtaagactggaacccagaacaattcacctcctagtcctattttgtccttcatcatggtcctggaagagtataaaagtcagcggcctctaactgacattaagacacaaaagagaatttaatttaagggagaattgcagtgagaagtttatcttaggtttctactacccaataatggctcttagcttttttagagttatctttcatttttctctccactctcttcagccttcctcactcctagcccaggttcataaaaatgaagccattcctcattttacgaagacataccttatgatgaatggttgcagaaggcaaatcctgctctttacaccataacccttttcacgaggtctaatatatcttgtcaagaacacagcaggatgtgtggtggggagataactgcagagccctgagcgttacatcactttgagatgggcaagagaaacagtggcgacccttaattgttcctgaagcccagtcacagctcacatgcctttttaaacagctgggtttcagagctctgtttagaaagttcattttaaaagatgagggaataaaaatgcaagaggaggccctgaaattctgaaacctgcagtactggtttcagatcaatctgggtttgctctttgaagcctgaaaaggcaatgggctctggccaacagtgctctcaccttggcgagcagagggaataataatataagcagcagcaaacacttttatagcacttctcatgtgccaggcacgttttaagcactttctatctattaactcatttaattcttatgatatagatattattatccacagatgaggaaactaagacacagaaagaacttcctcaaagccacacaactagtaaatggcagaacctggatttaaaacccaggcattccagctcccagtgccaatctcttaaaggtttatgactacaaggggtttccttttatcccatatactctactgtcctagaaaaaaccacctctggtgctttccaaggccaaggaatggaaataatgtgaacacgtatgtgggctgaagttaacatataaaagccctgatgtgcctccaaaacagaggccaggtacattcccctaatgcctggccactttcttctcctattttttcccctctcctgccatactgaaaatctacagataatccccccaactaccaactaggcgaatgccttattaacacttctaagatattaataggtggacaaattattgatcagaccaatctataagcaagagtccacccaacttgccttaaatcacctgacaaattatgcagagctctagcttcctacatttctaccagtatcccagggcctctggctctataaaaggagcaggccatgtaatgaacccagacatccaaacctacgttcttcccccttccacagcatccaccagcaattgtccttttaatattagttctataatagacacaaaataactgatcttaaaatgattgctaatcagtttccagctactatacaggtaggctttctgttgttttccactaaaagtgactaaggttccggttcttgttctaccaacttcccggggtttcaaggaagcccaaacaaaaccaacaggtttgtagtcttgtggtttgctttataactcatgataggcatgagttagtctgggcattgccttactctacaccaccggattctaaacatacttttactacttggtcaccatcttgctaccagatttgaccaagtttctgcatcccaagatgtgatgctaacatatacagtgaaaagtccagaaagacttgggggctttctatctcagagatcctcttaagcccattcctacctagcaaggagtagccctgtagtagctactacttctgtaatagccctgcagaagcaggaaggagatgtgcagtaactaggcttggtaatcatcagaagctcaagagactctggtttagagaatgtcattaaccgttaagacggcaggaatcatgatttttgtacatttggtagaggctccggctttggaagtgtgcaatgatcttttcacatctggtgtgaatcaaatgcaagcctcactttcaacttattgccaacctcctcatgcaagtaggttccttttccccttcctaagtacttgcatttgtgggatcctcacagatttgagtatcaaagcaaggttaagtttgcttctccctagtttccccacagccaccacatcaagctgttattaagaacccatttcagtgctgttcagaaagtggggtacttgccaccatgcacttgactgtagccctcaccccactgccacgttggctgcaatgccccggacaaaacagccttggtgggtagaggggtggagggagtagaaagaaaggtagggggcaaaactgcccaggtctcccccccgctacacacacacacacacacacacacacacacacacacacacgctcgtacacaaacgatggttggaatgagacagccatattaagcaggtcaagaatctgggaacgtacaacttctgggacacagggagaagaatgcagggagctgggcatttgcaccacggtaaaagccgttaaacttagtccagcgggctgagatgaaatcagttccaggaggtggcataaagggaagcgcacgtgaagtggtggagaatggaactccagcgcagttgagagggatgctggggccaaactcaagctggagaagtaacacacggctgcacggggctctactccatgcccctccccctccccgtgcaatagtccagcgcccaccgactcctgctcccagcgccagccatccgcacggggcgcccccaccacgcgccactcctcctcacgcctcgctcccaccccctgcatcttccactcaccccacacgacacctctgcccacttttcggttacgcccccaaagccagcctccatctgccaggtccctcccctcacctccgggacccgactccccgcacactccgtcccagcggtgctccccacgtttcacggctcctcgctcttgctccctccgccctcatagactctgaacgccccctttctcttccctcgcccccatccactttcccctcacacttctccccgtccccctcccgcggtcacgcgccccccctcccccaatggctccttccacggcacccgctccaggcccggctcacctgcacggccacccccgtcccggcgctggtgcggctgctgcagctggaaggggatcgtggccctgagcggctgcagcccagcccggggggagccggcgggggctgggggagagcagccccgccggagccccccggcccctccgcgccccggcccccaggcacctccgcctctgccgcccgctgcggcccccgccatggctctcccggctgcctgcctcagccccactgcgagactcacacagccccccaacccccgaggccgctgcttatctgctgtacggggcggggaccggccccctcatcctagagctgtcattggactgcggaaacccagaccttccaccccagccaatccacagcttagccttccctttcctgaggatgattggtcgatgagcctagcgatccaagccaagaccccaccctcacaccgcccccttcggttttccaacatcccaggggctgctgattggcctgtacagaagagggctggttctccagcgccaccaatgagaagacgcagaataggggagcgtcacacccagtcccaggtagtatgcaaatataatgtcacgtgacgtcaggctgagctggagagtgggcgcggcgctgggtgtaggttggagtcaaacactagtgaaataatttttgggggcgggagtagggagcagtgtcaaactttacacagttgagtccctgaatcacagagaaagcgataccttcaaaaagtattacatttaatttaacctaaaaaacattagttttaaatccttataggatctcagtgctacttacaagctccaaactaagatcctacaaattaatgcaaggtttgcatatcatttgcatgtgatttgcattatatttgtgtatttaatggcgaccttgcctcgtgtgacacttacatctgtctttctccacgtttccaagtccctacttggtgttgatccaaccttaaaaaaacaattgctagcctgtaaattaaattgggactctgaaaagaagcagggaatttcccttcagagtcgtccactccaagtctagctcagcagagtgaaaggaacaaagcaactgaaaaacttgcccaagtttgcaccgcgactccgttaacaaatcctggtcttccaagatcaatgctctctgacttacaagtcagaatgagactggaaggtccccaaagagaatgcatgcagttgtgaaaagcacatgatataataatataaagggatttgggaaagaaaataacatttaagatactattaaaaagtattatgcttcaaaagaaaaaaaatattactcttggtatttgttaaccattttgttctacatatggaaaaagcaaaagtcaatcaaccctggattgtctgtgattggggaccattcaaataattgaataattccctccagatttatatttagctgtgaattctatttttgatcttgctacagatttttctttctatttctgtttttgcccagtttaatgttaaaaagaagatattccctgaagccatactaactaatcagagaaaaagaggtaatctgggagcctgctgtgaggcaaagagaagtcattctgggattaaatattgaaagtagataatacccaaagtggaaattcaagagtgggttgaatattaaaattagcctacatacactgaatgaattgaggcaatggaacataccgaagaaaggttttctttgcaaagagtgtactcttgcagttttgaaggatttacttcaagatctgacatttgaactgtttttttaattgattgaagaaatgctgtactacttttccatgaagaggacaatctaatcaaagacagagaagaataaacaaaaattgatgaactgattaaaaactcagtctttataagattaattaactcagttgaaaaaagatatcttgcatttatattgttcctcaatttcaagtagttcaaagtcttcatgtacttttaagaaatcctcatgacaatctggaaaaggaaaaacatggattcttaccatgttacaagtagtgaaactgaagtccaaagaagtgagtccttttgattcctagctcagatctctaacacatcatattgaaccaccctgcctcacatcttcattaataaaatcagtaatggtagcaacgaatattcattgaattcctttctccatgctaggtacatgttaagtaccatgcatactttatcttatttattgctcaagaccacacttgtgaaatgggtattatttcctcttcattgagacttcagggagaaatacagtaacatgcccaagattacccaggtagcctgactccagagctgagctcctgatctctatgagtgtaaaattttcttaagaacacaggattactgttcacatcttacataaagggtctccaaagatgcaaatctgattaagatgttaaaattaacatctgtctagtgttttatagctttcacatacattatctcatttaattatcacaataggcatgtaaggcagaaaatgtagatattattgtcctcattcttcaggaggttaagtcctacagaggctaggtgacttgcccaagatcatcttagtaaatggcagacctaggacttacatccttggtcttttgactccagattcaatgctttcccaaccaacactcaacttctagatcattggtcctgcctgagaggcaaaaggtagactagttggtcttttgaaagcttttcttgtctgacaacttatactgtgttaggacccctcaacatgtaaattctcaatcttaggagatgatgagtggtttttattggctgagccagacaatgtgtgtttagaagtaaagccctaggatgagaatcttgaaacactttgggtaagtggcttcctctctctgtgccagaatcatccctgctccatcaacctcacagacttgttctaaaaataaggcgacacattatcgtacagatgcttccttccctcagagagaggagtaatgtgcatggttccatggatactgtgtttaaactttattccaaagccaaggtaccagaaattaagaacctggacggtagaaaaagaggcagtggaggtggtatagctaaagaaatggatcttctgagtccagaaagtcatggtctttcctgataagttgctggcaagacactaaagttgatcctagctggaggagtgagaagggaggcatgcataggacaatttggtcctctccttactaggtatcatgtccaaccagctgtctcttattctcttctctatcactgatagcttctcctggcatgggcatgatgggaggataaggactacatctgaagattaatccgtctgcttcctccaatgaaggaagccttggctttggggaggctgtgcactgctaaggggagatgacttgcattcattacaaagcatctaacttgcaacaaaacctttgccactgcccttactgtcatgcttatcaacatcatcgccattaattaattagctcatcacaaatttattgaaatgaacactatgtgccagacactgagctaggcactgagctctgaatgacaataatgttcagagacattgtccctatgctgaagttcacaagccagcaggccttgaagcctgtatgcagaagtggccctgggctagatgctatttcatttgggatacatgacctggttcctgctttcagagactttgggtcagaggatgacattcaaaaacatcaaaagtagaggattggctgggtgtggtggctcacgcctgtaatcccagcactttaggaggccgaggtgggtggatcaccaggttaggagttcaagaccagcctggccaagatggtgaaatcctgtctctgctaaaaatacaaaaaattagccgggaatggtggcaggtgcctgtaatcccagctactcgggaggctgaggcagagaattgcttgaacccaggaggcggaggctgcagtgaaccaagattgcaccactgcgctccagactgggcgacagagcaagactgtctaaaaataataataaaaaaaaaaagtagaagattatagatactaagtgtatcaataattttttttaatctataagagacttatttgctttatgggtttccaacagcaaatgctgttgactgcagcatgctcttgggatgtccacagctaaatgtcagaaataaatgagaattggcattatttttcctacaggtgtaagtcagagatatagccattccccaagcagtccctatgaggtttcaagtcttaaaagctgcaagggtctaagagattaccaagggcaaaaggctgtggggacttctggcagatcagaggatcagcagggaagccttaccctgctggctactgaatcaagaggaactttccactcctgaaggacctcgctgggcctacatccagggcaccttgaattccaccctgtgcctccatttatgccacaggaaccaacaagaatgggagtttcaaatcaccatttttacccttcaaaatatgacacccagtagcaattattcagcgggctagagaagtcttggtattccttggtacctggaagacggtctctgaacttcctagtaaattctaagtgcttacgtctttgctccccactccaagttccaaaataataaaacagaaaataagatgacgcagatacactgtgtctctttccgacctacctcctttactcagcctctgtctgaaatgtcaggactggctcctcagggaacaagatcctgaggaaatggggtcagaactgaaggagcaaagcagcctgagagggattgggaaggagggttgagggaatgaatgaggttatgggaacagagtagggaggggggtcctagccctcagcatctcttcccactctggtgcctccctctccctgcgtcccttccctcttactctcagggtagccagatggcctggattttgaccttcagtactttctctgactcattttgtcccttgctgtggcccacgacatgctgtcttcttagctctctcacttgttccttcttcattcagactggctgacattcaccccttcagtctccttttgctctcagtggccatctactttccttgctaaatggcagcccttttaaaatgaagattcttggctgggtgtggtggctcatgcctgtaatcccagcactttgggaggctgaggcgggcagatcacttgagatcaggagttcaagaccggcctggccaacatggtgaaaccccgtctctactaaaatacaaaaattagctggccatggtggcacgcgcctgtagtcccagctgcttgggaggctgagatagaagaatcccttgaacccgggaggcggaggctgcagtaagccgagatcgtgccactgcactccagcctgggtgacagaataagactccatctcaaaaataaataaataaataaaataaaatgaagattctcatccttgacaatatatgatatggtggaagttttcaaacaggtaaagggtaaatgtaggatcagagacattaaaactttagaataggccgggcgcggtggctcacgcctgtaatcctaacgctttgggaggccgaagcaggtggatcacgaggtcaggagatcgagaccatcttggctaacatggtgaaaccccatctctactaaaaatacaaaaaaaattagccgggcatggtggcgggcgcctgtagtcccagctactctactcgggaggctgaggcaggagaatggcgtgaacccaggaggcagagcttgcagtgagctgagatcgcgccactgcactccagcctgggcgacagagcgaaactccgtctcaaaaaataaataaataaataaataaataataaataaaactctagaatattggacttaatggtactctaagaaaaatacaaggtagattttaaacaaacaattggaagaaacagtagaaactatatgtgattcagcctctcacattacagacctagaaacagatgcccagacaaggggaggacttgtcagaggccattcagcaaatcagagacaagcaaaggaccaggacttctggatcccgttcagtgctgcctcaaaacataaataacttctaaaagaatttaggaccaggcatggtggctcacacctgtaatcccactactttgggaggccaaggtgggcagatcacgaggtcaggagttcgagaccagcctggccaacatggtaaaaccctgtctctactaaaaatacaaaaattagccaggtgtggtggtacgtgcctataatcccaattactcagaaggctgaggcaggagaattgcttcaacccaggaggcagaggttgccgtgagctgagatcgcgccactgcactccagcctggttgacagagcaagactctgtatcaaaaaaaaaaaaaaaaaaaaaaggatttagatggagtacttttcagcaacaaaaaggaacaagctactgatatttgctatagcatgaatcgaccttgaaaaaattatgctaaatgaaagaagccaggcgcaaagaactacatattatatgattccatgtatatgaaatgtccagaaacgcaaatttatagagagagcaagcagatttgtgattgcctaggactggaggtgggagcagggattacctgccaatggacactttttcgaactctttggggtgatgggaatgtttctatgctagaatgttgtgatggttgcacaattctataaatacacttaaaaataatagaatcggccaggcgtggtggctcacgcctgtaatcacaccactttgggaggccaaggtgggaggatcacttgaatccaggagttcaagaccagcctggctaacatggtgaaaccctgtctctacaaaaaatacaacaattagccgagtgtggtggtgcacgcctgtagtcccaactcctcggaaggctgcggctggcagatctgttgagcctgggaggtggaggttgcagtgagccatgatcataccactgcactccaccctgggtgacagagtgagaccctgtctcaaaaaaataaaaataaaaataggctgggcatggtggctcatgactgtaatcccagcactttgggtggccaaggtgggtgaatcacttgaggtcaggagttcgagaccagcctggccaacatggagacacccccatctctactaaaaatacaaaaattagctgggtgtggtggcaggtgcctgtaatcccagctactagggggctgaggcagaagaatcgtttgaacctgggaggtggaggttgcagtgagccaagattgtgccactgcactccggcccaggcaacagagcgagatctctgtctcaataaataaataaataaagaatagaattatacatgagtaatgggtgaattttatggtttataaattatacctcaatcaagctgttttgaaaaacaaaaaggatttagatacatttatctctgagagattgatgatgtgtgggagaccctgctaatcttttcaggggaatgtcttaggaaacaaatatacctgcccttatgatatccctaaagagttactgtgacagacagaagatgccgctctttggactatggaatatccaggctggtatttctcattaaaaaaaaaaaatgtcctcctgcactaaaatatataagcttcctaaggagagcaggtatgtcttggtcatctctccataacacctagcactgtaaccggcatgcagatggtgcttcatgaaaaatgaattaaagtttactctagttccactgtgtcaagtgggtaccttgagaaaccagctggtttctagagcagtgccttagcaggaacagtctgcatcctccacacctgactttcctaggcaccccctcccagaggaaagtctctggagaggggatgctggttgagtacattcccaggagactgtgtataaaccaaaagatctgtttcatgccccactttagatttctttcttctccactgttcccacttatcttcttcaagtctgcctcaaaactacaattgtccctgggggcaaataagctacaatatatctttgacactctccacctgattctacatccactcccactcccttcccttcacaccatgcaccaaatcaggcaacaagtatcatcaaaagggccaggtacggtggctcacacctgtaatcccagcaatttgggaagctgaggtgggaggagtacttgagctcaggagtttgagaccagcctggatgatacagtgagacctggtctctagtaaaaatttaaaaaattagccaggtatggtggggcatacctgtagtcccagttatttgggaggctgaggtgggaggattgcttaacccaggagatcaaggctgcagcaagctaattttgtgtcactacattctagcctgggcaactgagggaaactccacctcaaaaaaaaaaaaagtatcatcaaaatccagttcaagctgggtgcggtggctcatgcctgtaatcctagcactttgagaggtctaggtgggtggatcacaaggtcaggagttcaagaccagcctggccaacatagtgaaaccctgtctctactaaaaattcaaaaattagccaggtgttggccgggcgcagtgactcacgcctgtaatctcagcactttgggaggctgaggcgggtggattacgaggtcagaagatcgagaccatcctggctaacacggtgaaaccccatctctactaaaaatagaaaaaaattagccgggtgtggtggtgggcacctgtagtcccagctagttgggaggctgaggcaggagaatcgcctgaacctgggagggagaggctgcagtgagccgagatcatgccactgcactccagcctggacaatacagtgagactctgtcaaaaaaaaaaatccagttcaaagatatgaaaatataacagaagagatgagtaatttgaaaagtggtctatggtctgatttcctttagacccagggcataggccccagagcttattttcagagttgaaaaatatcatttatggccaggcgcggtggctcatgcctgtcatcccagcactttgggaagccaaggcaggaggatcacgaggtcaagagttcaagaccagcctgaccaacatggtgaaaccccgtctctactaaaaaatacaaaaattggccgggcgtggtggctcacaactgtaatcccagcactttgggaggctgaggcgagtggatcacaaggtcaggaattcaagaccagcctggccaacatggtgaaaccccgtctctactaaaaatacaaaaaattagccaggcgtggtggtgggcgcctataatcccagctacctgggaggctgaggcagagaattgcttgaacctgggaggcggaggttgtagtgagccgagatcacaccactgcactccagcctgggcgacagagtgagactgtctcaaaacaaaacaaaaaattagccaggcgtagtggcacacacctgtaatcccagctactcaggaggctgaggcaggagaatctcttgaacccgggagacggaagttgtagtgagccgagatcacaccactgcactccagcctgggcagcagagcaagactccaaccaaaaaaaaaaaaaaaaagaaagaaaaatatcatttatattgtagatataaattgttgtacataactacaaaatatcaccacagattcttattaaattttattttctgtgccttggtcaatgagatatcaccctgccctgcaactccatcttcaccatcatttactttagcttcaaattagacctcgctttctccaagtgttcctcatctacccttatcagctactaattctttcaggacttaggtgttcagtttgtagcccataataattttgtagtagcttaaggtagcttttttttttttctggcgactgagtttcattcttgttgcccaggctggagtgtaatggcacgatctcggctcactgtaacctccaccaccctggttcaagcgattctcctgcctcagcctcccgaatagctgggattacaggcatgcgccaccacgcccagctaatttttgtatttttagtagagatgggatttttccatgttggtcaggttggtgtcaaattcccgacctcaggcaatctgcccgccttggcctcccaaagtgctgggattacaggcgtgagccactgcgcctagccttaaggtagctttataatttctccaagtcattttaaatatggttgtcttttctccacagctgaaagcaaaggaactcattaactctggtatttctttttcttttttgagatagtctcactctctctctgttacccaggcttaagtgcagaggtgcaatcatagctcactgcagcctcgacttcccaggctcaagcaatcctcctcccacctcagcctccggagtagctgggactacaggcagtcgccacacctggctaatttttgtattttttgtagaggcatggttttgtcatactgcccaggctggtcttttttttttttttgagacggagtctcgctctgtcatgcaggctggagcgcaatggcgtgatctcagctcactgcaacctctgcctcctgggttcaagcgattctcctgtctcagcctcccgagtagctgggactacaggctcgcaccatcatgcccagctaatttttgtatttttagtagagacggggtttcaccatgttggccaggatgggctcaaactcctgacctcgtgatctgcccgcctcagcctcccaaagtgctgggattacaggcgtgagccaccgtgctctgtcaactctggtattccttgtcagcaactagcacaagctagtgcatccagcaatgttgagtcagtgtttgttatttaagtatttgactgtttctccaactaatattcctgatccactcctgaaagttgatgctaacggtcctgcaggctgatagtgggaaaggctccagattttgtgaggtctgatgtttcttcttaaaaaaaaattactttgggggttcctcattaagtaaaagagtttaaaaaattatacacatagaattaggtacagtgccttggaaggggtctgtgcgagtaatgggctctgactccctaagtttcactagcattactgtaaatctacttctcaccccaccctctggcccccctctgttgcctaggctggagtgcagtggcgcgatctcagctcactgcaacctctgcctcccagtttcaagaaattctcctgcctcagctcctgagtagatgggattacagacatgtgccaccatgcccggctaatttttgtatttttagtagagacggggttttgccatgttggccagactgatctcaaacccctggcctcaagtgatctgcctgcctaggcctcccaaagtgctgggattacaggcatgagccactgcgcccggcactgtaaatctacttctgacggaaggaatgaagcccagttacatcccacccaacacttcaaccctgactgaatttggtgtctattcctggtttttactgtggatttcctgtacccaacacatctattccacaagacggccctggctcaacaaaatggccttggcagtctctctagctgatgaaaaagtcccaaagggctgactgacactcctcccacttagtaacttagtggctcttagaacagtgctcctttcggcaggcggtttctcctgctgtgcatggttgaaggtgaggaacttgtacccaattctggaagcccctgatggttcaatgcctcgaggagttgtgttgtgcagcggaagggcctggaatgttccagtacattccaccagtggcctctgtgacccctgcttccattcaactttggcaaaggcctggtagtctacaaagtagcctgtattctgctggggtaggaagcagcttggccttgcttcttccttgccactctgataatatcacacaagttggcaccttccctggaagtcccacccaaaagctctgtccaactctctggcctcctgggtatttgcccagaatgttgagttagggtttagataccaatcctgtcaatttcttggccctgtacacccaattctgaattcttctcctgatgagaaaccatggggattcctgaaccaatggtgggtttgcattcctcggaatgccaaaaaagcaccacccccctcccttcatacgcctgtggagatagtaacatcaaggctccaggaaggaagtaacacagccaacagccatgatgtaaccggccatgtgcccctgcttcacagcacagaagaatggcgcttctacttgctgggcgctgactacaggctaagcaatttacacacatggtctcatttgatcctcatgactaccctatacagttggtataatcatccccatttcacaggtgaggaagttgaagcacagagaggttaaaaaatgtattgatggttatatagctagaagggaaaggtccaactgctttcaaagattgtgcacaaccactactgaggggctcagtggactaggtcagagagacccagacctagacaagtgagaaatacaggccagaccagtcattcccctgcctctctgtcaccttccacagccctaaagactctagagctctgattttgtttataatgctaagaaattatggaggtgcgtctagaggtttctagctgctcctggtataggagttgaactattctgcgaaaggattattatttactattatgtctctgcctccagtggactagcctaggaccaaatccactccctctctccaagcttcctactttgggggaggagagcaagatggggaaagctggggggtttccatgaaggagaaaccagaagattaaaggaggaggaggctggcgctgccctttcagaaagcctgccaaagctagggaaccgggattcctaagacacttcaagagtgtgccagggaaagtaggaaagctctttgtggggtcaaaagggaagctgcaagaggaggccctaggggagacttgacggaagagggtggaagaggaggtaagaatccatgcaggaccagaagcgtgtgtggattctgaaaccaccaaaaattcaaaagagaaaaagactcactccttgactctgtctccccacctcttgggtggggcagccaaataaggggaattcttgtgggactgtgctctccattgccagaaaacactggctgcatcgcctgcccagcctgccagaatgctgctggaaagagtggctggccgctgtgtttggttgataaatgatgggcacccctgcctgccgcccattctctcttttctccctgcttagcttgcagccttctgcctggcagggagcctcagggtaggggtgggggaatagggtcctccagacagtattttatactcagtgattaataggctgctggaaggggaggggtgggaagcaaagagggaagccccaagcctagtttccatgaggcaccagtgcaccactgacaagagtcaaggtatctcttttcttgatgcctattccttcagacccagctttgggacaggatgcagccttcatccctcctggggcctgagactctggtagtatcttgtatgagacctatggaactggctggaatgaggttaatggacacacatccaaatcctcaaccttttctttaagctccacactgctgggagagggaagaaataagtgaggccaagcagcttaatagctgtttttggaggatttttttttttaatgttcaagaattcttttgaaccctccatggctccaagaaaaactatttgaaatgtcccttcttatggggccagggggttaagtgccagggatggaaggctaaatgccagggatgctggttgcagggattcttgggaccggggctaatggcctccctgctgtgggctcaggaataccaggcccaggcactggttgccctgagagatgcagccatttttacttctgattgaagggcaccaccttccgggattttcccttctctggtgggaaacagagtagaatatgccaagggaccaacagggtctgtgcccaagagtggagggcactgaaggtgataacatggaggcactgggatagggtgagaccaatgacttatacagcttagaatttggtccttcctggcgggaagaagatgcactttgtgggagcacatggtaattgcccttcgtaagggtgatctcaaaaggtcaacggatgggccttgaatagccctaatgtccctgaaacagtccattgtgtagctattgtctatacatgtaaaggaacccttcttgaccctattcatacttttctttttttgcctctggggtttcccaagtgaataattgcatactaccttatttatccttccacccaagtctacctcttttaagctaacaacaaaaatagttcagaacacatttcttgagtccctattaagtgccaggcatcatgctaggtgctggagatatgcagataaataacacatggtccctcctctggagaatccacagtctgttttttaaaaaatgacccttagtgttgacttttgggattttgaaaacaaatctgcatgtatctcctttatattttcatatacatggatcatgatttcagcctctatcttttcacaatcttttaacattttgcctggtatagtagtctccatttagatcaattcagattactttccccgactctgatatatcttcctttgcaggtagagtgaccagaattaggcgctatatttcacatgcaaatactatataaatgtgtgtacaagagtaacactatgttttctaacttccttcatttacccacttgccattcatgcatacatccaatagttattgaatgcctactaagtgccatgcactctgccaggtcctgagaatgcaatggtaagtaaaatggacactgccctcatggaacttacagtctggggtgtgtgttggggagacagaaagtaaagaatccaaataacacacacataaatgtataattacaaactgagacaagtgctatgaagaaaagcacagtgtgcaataagagcatggcagtgggggccttgatctagcctggagggttcaggaaaaggtttcctgagaaaatggtatttgagctgagatctgaaggattagtgaaaataggcaaagaagaatatgggggaagaacattccaggcagagtaaagagcatgtgcaaaggtcctgagaaggaagaaacctgcacactcctaaggaattgcaggaaggccagtgaagctgcggcactgagaaggaagcaggtttgtgtgagatgggcctgaagagttagccagaagacagaccaggcaggacactgaaggccagggaaggatttctgtctttacccctccatggataggcacatggaatgaaggtctttaaagaagagctgccaatggttctttctcccagattactaatgctacttacagttgtctggaaggagaacagtcatgacggtctaagctgctaggaacttcccagcatcctgacatggtgtggctatgcctggctgtcactggggagcccccagaacccatggatcagccctagcctacagccctcaggcaagggatagcccccacccatgtggacaaaggggcagggtggagggtgggtggagtgctttgcctgagatctcagctctgcatgacatttggaacagccccaagactatggctctttttcctagataactctatcatgtgtaccccccatttaaatggcctgccgcccttcctacagcagctgtgctccccacccaatctggagaaggtccctggataagaactctgactctgcccagagacttgggtcttgacctgctaagtttaggcctcaggactgttgggaaccatggatatatacatatccttgatagttttccaggggtattaatggaagccattggagaagagggtcacaattgttggactcagcctttctaaagccagtcctttccttccagtcatatctttggaaaatgtggtttggtgtagtgacatctgctggcaaggctaggcacataatacaatgactggatgtccactcatcctcatgtaatttccagactagcaagaaaatcgttcttaacttctgagattggattgggctcagtaacctcagttggcaagagcaagactaagatgtccaaggatgtgggtctgaactatgtatgggctagtttgccttaaatagagaaaatgtgtttcctagttgtggcttatacccctcccattggtcagttgattcatatttgggtacagttaatcacaagggagattgggcaaacatgtataaatgactcagaggaacccgttcctagcccctatgcctgggaaagcatctcccaacaaataaaaagacccacattttacaaatggcaaaatgcagtgtcatttttttatcctcctgaggttgactagtttgggaaactttttagtttctcccaggtcaccaggaaagtagtgtctacagaatcatcttcatggttcttatagtgggcaagactgactagggcttttataatggcccctccacacatgctggggtaagggcagtggcgtgatcttggctaactgaaaccgccgcctcctgggctcaagcaatcctcccaccttagcctcccaagtaactgggactacaggtccaccagtaattttttgtatttttagtacagatggggttttcccatgttgggcaggctggtcttgaactcctggcctcaagtgatctgcctgtctcagcctccgaaaagtgctgggactacaggcgtgagctaccgcgcccagcctctcctcaccactttcatccatgccatgtacacattctgtttacaatctcaccctttttcagtagtatgtgatcttgacagcattcaccactagatgtaattgggatgccagggggaaagggtgaggagaaaatactaaagacatgattctgaagcaaacgttctgccttttctttttgagatggagtttcgctctgtcacccaggctggagtggaatggcacaatctcggctcgctgcaacctccgcctcccgggttcaagcgattctcctgtctcagactcccaggtagctgagattataggtgcccaccaccatgcccggctaatttttgtgcttttagtagagacgggtcttcaccatattggccatgctggtctcgaactctacccaaccttggcctcccaaagtgctgggataacaggcgtgagccaccatgcctggccatgttttgccttcttagtaacagtaacactgacccataactgaatgtagctcagacaaagcatctctttctctcactcaaacttaagaaaatcatcaagataaattagtaatgaatagggtttcccagaagaggaaacagacctagtaaataaacacatgaaagactgaagtatatcctcagtagaaataaaatcgaaagcacatttggggtgccattttcatttttattaaaatgacaagatttttaaaaagtggtaacacttagttctggaaacaatgacttaaattggcacccttgcactgatgatgacactgtaaattgtgaaagtctttaaggaaaggaaagaagcaatatataagtggcagaaataaaaacaggagagagctatggatgcatgcagacactcactgcagcattatctgacataaaagagctttaataactccacaacaggagaatgagagcacattacatcatagcaccacagtgcaatgtcacacagtgagtatagttacaattatgaggactctagggaaacacagaagatgctgagaagatgtacaaaatataaaatttcagccaggcacagtggctcaggcttgtaatcctagcattttgggaggctggggcaggaggatcccttgagctcaagagtttgagaccagcctaggtaacatagtgagaccccgatctctacagaaaataaaaaattagcggggtatggtggcatgtgcctgtagtcacagctacttggaaggctgagcaggaggatcgcttgaaaccaggaggttaagtttgcagtgagaggtgattgtgccactgcactccagcctgggtaacagagcaagatcctgtctcaaaaaaataaaataaaatttcatgtaaataatgagtgtatctatgttaaaatatgcacataaaatgtatgcatgaggagaaaaaatggaaggcaatatacaaaaaataaaaatagttgggtcaggcgtggtggctcacgcctgtaatcccagcactttgggaggccgaggtgggcggatcacgaggtcaggagatcgagaccatcctggctaacacaatgaaaccccgtctctactaaaaatacaaaaaaaaattagccagtgtggtggtgggcgcctgtagtcccagctactcgggaggctgaggcaggaaaatggcatgaacctgggaggcggagcttgcagtgagccaagactgcgccactgcactccagcctgggtgacagagagagactccgtctcaaaaaaaaaaaaaaaaaaaaaaaaagctttgtgccaggcatggtggcttatgcctgtaatccgagcattttgggaggccaaagcgggtagatcacttgagaccacgagtttgagaccagcccgggcaacatggtgaaatgctgtctctactaaagatagaaaaataagccgggcatggtggcacgcacctgtagtcccagctacttgggaggctgaggcaggagaatcgcttgaacccgggaggcacaggttgcagtgagctgagatcatgccactgcactccagtctgggtgacagagctagactttgtctcaaaaaaaaaaaaaaaaaaaaaaccctttgtggcggcaatgagattaaggatgtcttttattttcctcaaattttcatttagtgttattacactgtgttaatcattttgaaatggtggaagggggttgagggcaggtgaaagtgctcctctagccccttcctgtacatacttgtcctaaattgacagagaggaaagaccatgtctgcttattcagcttctggccaatgcctagcacctatcaggtgttaaataaacatttgttgaatgtataaatgaaaatgcctgcagtctaaatgtctcagcccatggtgaccgggtactttccaccccggcaaatagagcaatttggttttgctggaataaaaaaatgaaggtttatccataatggcaattccctggtcttcttggtaagtgaatgtgggcatggagaacccaggagagacagtctgttaaagaaaacccaattaccattgtggaacatatgttgccctgaggcctctgctgccataacaacatcttgtaactataactacagccctggagggctttggccccatagaatatggaaaaggatgtcttcatcataagacagctttgtgctcagattgacttccctagggagcttggatcagggaagggaggtagataagtggaggaagggggggagatgaagggcagaggtgggagaagaactgctattgaatcaagatcagagtgatttttttttttagcgattttcaaaatgtggttatttgactgtttagctttggtggttatttatatccccagctgcagaggcagggagctgtgcctgagcctgctgggatctgtccaataacttctcccagggtggggctgcgggtgggggctaagggtgctacaagatccaaattaggtggccagaatgtaagagaagctccaggccatctccagcaagagtaaagaagaagggcctattagtgactgtgctgaccatttttaaggcagctgcaaatgaaaatattttaataggaattacggtcacatcagcaacctctgagattctcccaaaaggatagagactaagccaatactttgcctcagaagttatgagattgacctggctacactagcattgtctttaaaaggccaaggcatgcttcccccaccttacaagactgcacacagaggaaatggctatccctaacccctactagccacctcactggtcagaaagaggcttagaggagagagcatggctggttctgtgcaagcctttcctagctgagtcaacaactggcagtggggtgagaaacattcaatttggtgccaccccaattactaagcccttttgggtgccagtcagcaagggagaagctggagatgctgtggccatccaggcaaggctcctaacctctggaagaagcaaacaatgaacaactacattttgtatttgaaatatggtacctataattttactgtcaaggaaacactttaaaggacatcaagggatcttttaggcagcttacaaaactgaggaggcaagagactgatacaagtaaggaaataacacaagcacatacacacaaaagattgcccccactcccagtgcctatttcagtctctccttgtctctggctaaggctatttcagcagccttctaactggtctcctgccttgggtctccctcctactctgatcagtgcccttcacagctgccagaaagagattgctaaaatgcatgtctgactggcggcctcctctgcttaaggactttcagaaattgcctaccacttccagttcagtctccacagaagggtgctgaacactctgcatgaactggttcccaaaaccatgcctcttatgtaccctccccggcacccatagataatgctcctccacacctctctactattgcacattctgttttctttgcatggaaaacccttatattgtccttgtttactggcaaacattcatcctgtgaaattccactcttgcttcacgtcttttatgaatcctttcctaaactttccagatgaaacactctacctcctcctctgtagcacttctgaaccttgcttatctccctattttcccatgtaatactctacagtgttttgtaagtgtgtgctcactggcttgtcttccctactggattctaagctcctttaggggaaagttggtgttttgtccatggggtataactcagtgcctggtacctgggtgattaatgcctgggtaatcactctgtatgtcttcagttaaagtggttgaacagaggttgaacagagttaaagaggttgaacagataaaagcaaacaatcactgagaccatgtaaatatatagtcactaacattagaatgttatagccatgattagagtgactggaaatataaataacaatagccatttattgagcaattactccatgtcaggaactgtgcaaagagctttacaacactcatcttctttattccttacaaccttgtgaggtggctattaatgtccccacatcacaggtgagaaaactgagacacaaacaaatttaaaacttgtccaaggccgggcatggctcatgcctgtaatcccagtgctttgggaggctcagatgggaggatggcttgaggccaggagttcgagactagtctgggcaatgtagcaagacctcatctctacaaataatttaaaaattagccaggcatggtggtgtgtacctgtagtcctagctactcgggaggctgacgtgggaggatcgcttggcccaggagatcaaggttgcagtgagctatgattgtgccactgcactccagactgggtgacaagagtgagacactgtctcttaaaaaacaaaaaacaaaaacaaaaacttgtccaagagtaatgcaggtaggaagcagcagagcggagattaaaattcagatctgacatcaaagccctgtactggacactagtacagctgatgatacaataaacatgatttatctatgtttctattatctgtttgggaagggaaatgaacagaattatctaccaaattgtacaaggaaaataacaaatccagcagttaagtgcaaaataacatatcattacgccctactaccttacaaagaatgaattggaaaagattttctgaaaaaataaaattttattgagggttaggagatgcatccaggcaggaagaaaagcctgagaaaatagaaaggcaaggagaactgtcgagagtgtcaacgtgaagtctggtgattgaggatagccagggggcaaccagtcagaggcattgaaatcaacatcagttcctgcttggaaagctaattgtgttgtgatgaacatgactctcaaagtaaatattatatttggttttttaaaaaaagaagaagaaataagcttttaagatcctccccttccccattctaaatatacctggctggtctactttcaagtactatacacatttttttccttatgatcatgtttctatcctactggtgttagttttttcatctttctgccagagtgtacactttccaaggacaagaaccatatctaaatgaaactgtaaactctttagtgtcagctgcagtcttagggaatctagcataagaaattaactaacgtcgaacatctgtaatgctggtatttgtgtgacggatgcaagtcaggataagatcttattctaaaacactaatttccagggaggataacttcaccatctctgagcgctatacattcagagactgtaaaacagtaatgatattcttactgagtagcaagcatttactgtgggaagaacgaggtttgagcaccattggaaaggatggtatgagccaggcgcagtggctcacacctgtaatcccagcactttgggaggctgaggcgggtggatcacctgaggtcaggagttcaagaccaacctgaccaacatggagaaacactgtctctactaaaaatacaaaaagtagccacatgtggtggcgggcgcctgtaatctcagctactcgggaggttgaggcaggagaatcgcctgaacccgggaggcggaggctgcggtgagccgagctcgtgccattgccctccagcctggcaacaagagcaaaaccctgtctcagaaaaaaaaaaaaaaaaagaaaggctggtatggctgggagtggtggctcacaccttaatcccagcactctggaaggccgagacagtagttcagctcagtaggtcgagaccagcctgggcagcatggtgaaactctgtctctacaaaaaatacaaaaattagccaggtgtggtggcacacgcctgcagtcccagctactcgggaggctgaggcaagagaatcccttgagcccacgaggtggagcttgcagtgaactgacatccagccattgcactccagcctgggcaacacagcaagactctgtcttgaaagaaaaaaaaagaagagagagaaaaaaagtaggatggtatgaaataactgagatatgctcttaatgtaagagatccttaccaccagttggggagccagaacattcaaatgtaacctcaggaacatatccgtgagtgcaaaataacagagtaatgtatgaaattaaatgcttaagtggtgaggggctacatgaaattaaatgcttaagtggtgagaagtaatgtgaaccattttcaaataagttcttacgtgcagttcaacctaagtaggttatcaaaggtatttatactaagcactaaaagctaagtattaaatactaaaagctgcctgtgtcaacactggcccaggacatccccaaggagagtgctggctaaaggtctggaactttaaatctttagagttctttacttagcacatcaatcagatatttaccttctgcttctttgttctttagccctgctcctgggggaaatctccatcttaacggggcctcagtttgaaattggggttcgggatcctaacttaatgactgagcgtgcctgggttccacccagtcgcaattggtcaagacttggtcctctcaaggcctttcctccggagaggttaaatcctcaacgcctgctctccactttccagccttttcttaaggctcttctttcagcctagtatctgtgaccaacttctccttcctaggccctctcattattatttaaatgtccattcttttgggggcttcaacttcactaaaaacattccttcctcttcctccgcctcgtaactctctgctcaagcatctggatgccagaggtcatttgagctaaatggggttcaaagcttttctgactctggtactgcattccccactttcaaatcacatttttcaccccagggcccccagtggtctcaaacccaaacacagtgcggttaggaagtgggcactcgccacagagctaaattgggaattatttgacctgcagcttctggagaatggttttgcctcctccccgcgacatcaactaactcacttgctgttagctaagggcaaggacaatgtctcctctaccagacaggaaacttgatggcggacgctatccgttagttcctttttcaattccccattcccaccccttcgagaccacgatgtttcttaaaatacaaagtttcttttacaaaacatccctccgcaactttgagtttatataataaacggaaacgtcctttaaacaatcaggctacgaaggggttaaatctaatctcagcaacctgatggattctggggggtttccttcctcgactctagaaattaaaacgaaattttgcccaaggtaaagatgagaaccgtttacatcaactgtcaggcttctgccccaaacaagaatggctacccacgcccacaaacagagccactcacgtaactaaaaatggttggctccgggttccaccactggagtcactttctgcccaacttcaaaatggcgcccactagcttcaccaaaaggatcgaacttcccagcaccctctctggcccgtaacgtcaggtgacgcgagacccagccggaagtgaaggaaaaagcgcttcagcccgcggcgcctgcgcagaacgctccagacgctgagaggcaggaggcactagggatcgtccgcaggattgggactgatacagaggccgccacggagcccgccggagccaccgttcctgctgctgccgccgctgcccgaatcggaaccgtcgggccgcagccgccggcaatgccgcgaaggaaggtgagaaacgggagaggagggatggcgggtttctaaggacagtcgattgagcaccgtgacgcagttggccacgcctcacagtgcttgggtcccaactttccgctcccccgaaccttgttcagctaccctctcttctgtccatacccaacagaaaaatgtgggcccgaccctggcctcggcctatgcttgcaactattcccgccctctgcttgcctggatcggaggcgttcttattaattggtcgctgaaacgtctggaagcatattgattggctggtgacgccgcctgtttgggctcaacggtcacctccccgcgtgcgggggcggtgtctggccccggccccagcgctctcccactggctggagagaacgatccctcctctcctgattggtcgaggttggcagtctgtcctgtgggggcgcggcttaggcggacctcgattgggtggcccgaatccccgcctttccgagcggggacgctgataggtgcagaggcggggttttggaggcctcgttaccttccaggtgaggggcacaacaaagcagaagactgggtggtgggaagccagcgcccactcgcaggggatccctctcaggccagttgcctctttccttatttgctagttcgacagcgcctagaaaatgcagttggtaaaaactaaaaacttctagaattagaaggcacttagaagatcacccaggaatggccccgtcgtttcttcttacagctgaactaacggaggcccatggagtgccgcaagccactcaggcagtggcagatccagaatatagaacaaatctaactcaattcaacaaatgtctattgactactttctgcgcggtggttgctgtggattcagaaattaattagatgtgatccctggcttaagggtgtcacagcccgataggagaaaacagacatgaataatcttagaaggatctagtaagttctcagcttggaggtgtatacaaggtgttgctggaaggaagtgaaggagcagttaagtctgccctggagtacaatgggagatatattggtaaaagccacagagaagagctgagttccaggatcaagccaggaaggaataagtctcacgtcaaggctttaaatatctcggtaattagactataatggtgacttttaagattcccccttcatttcagccgttttctgtgattcttgctcatttcctggcaggttacccttaagatacttggaaaactgggtggtattcttgctcatatcaatagaaatctttctcttcacagcggcttttcaggttgaaaatgtacactttttaatgtctcctaaaatgacctcagctggtgggtggtatgtatgtgtttttttgtttgtttgtttttgagacgaggttttgctcttgttgcccaggtcggagtgcgatggcgtgatgttggctcactgcaacctccgcctcccgggttcaagcgattctcctgcctcagtctctctagtagctgggattacaggcggattccatgacgcccagctaatttttgtatgtttaatagagacgggatttcaccatgttggtcagggtggtttcgaactcctgacctcaggtgatccacccgcctcggcctcccaaagtactgggattacaggcatgagccaccacgcccggccggtggtatgtatgtaaaggctcaccaaatgcaggaataatattggtgccttgaaatagggccacagtcctctttcttaatttcccaaataccgggagttacttgaaaatgtacatttttttagtaacctgtttggcggcaaacctgtcttaatctgtcctgaggctacttatggtttttgtgtgtctcatttagtgtgactgtttatattttttgctgcagaaatactattatgttttgttattgggtggtatttgcaggatacatgcaaagtactccccttctaaaaatccaaaacaattacaaattctaaacacaactggccctcagggttttgaataaataattgggacttacagtgtgaatctttgtattgttttcagtaaatattttttcctttctggttttgtaaagggtatagtgttagtgcttaattgataaaagttatctttatggctaagaaagaactcctcaggaggataataattgacaaatccttgctcattgaaaagatggttttgaaaacaactgtttttgaatacccatgagtcttcatgtgcaagctgcctttttggaagatagatggctttcatgtggagaaacgtcaaggatagatggcatacgcactaacaattttcatctttttctgcttaaattcttttgggattagagttgtggtccatgatattttgagatagtgtatggtttttaaaaaatgtgatagcttttcatggagacattgaacaaaagctactctaagttaaatgaggtccagcaccaacgattttctcactacagtggacctttttttgtgatattgatctccaaatggtcttggttaatacttagtactaatacagtaagaattaattctcttcatggccgggtgtggtggctcacgtctgtaatcccagcactttgggaggccaaggcgggtggatcacctgaggtcaggtgttcaagaccagcctggccaacatagtgaaaccccgtctctactaaaaatacaaaaattagctgggcatggtggcgggcgcctgtagtcccagctactcgggaggctgaggcaggagaatcacttgaacccgggaggcggaggttgcagtgagccacgattgcgcccttgcactccagcctgggcaatgagagcgaatgaaacggaagctcttcatttatttaacaaaattccctatttgtaggttgttccatttaagtgttctaaataaagtgaagttgcctgagggggtgggaggatgagaaatgcttgtggaatccttatttaggtttgaacttggggttttcagtgtcacagcttgttttattttcaatgttaatgcaaactctcagaccaaatgcttctgtgctaatatctggatctatggtattacagaggaatgcaggcagtagttcagatggaaccgaagattccgatttttctacagatctcgagcacacagacagttcagaaagtgatggcacatcccgacgatctgctcgagtcacccgctcctcagccaggctaagccagagttctcaaggtaaaaaaaccttcatttttccttaccactcctcacatctggctgactggcccatcacattattttcctagttaatgtggaaactggccccttggcttggtgtagatgacagtgcaccagatgattggtaaaatgtagagtgaatgcagagttgtcaggtctttaacaatgcctctgtggggggctactatccaatctgtagacccaaaggaactgcggatggtataatggatagagacacacgtatgtcttgagtcatttgtttgtttgtttgtttgtttttttagatcgcagtgtctccatcagtaaaattggaatgttatcccttcactttctgtttgaatgtttgaggcttagggacttgaagtccagatggtatctgatttatggtggcttgatttaatttttttttttaactttacagtggtgctaaaacaatatgcattcagtggaaacttttagaattttgaatttcggtcttttcctgggccagtgatatgtgggccaaatattttctcatgttgctgagtggtggcaatgagccataataactccagtcagtgagccgtaactcccagtcagccatttgatcatgagggtaaaccagtactcttcagtgtactgtctttaataaattatatgcaatattcaacactttattaaaaataggctttgtgttagatgattgtgcacaattgtaggctaatgtaagtggtttgagcctatttaaagtaggctaggctaagctatgatgctcggtaggttaggtgtatagcggttttttttattttctggagacagggtcttgtgctctgttgcacaggttggagtgcagtggtgtgatcttggctcactgcagccttgacctccttggctcaagtgatcctcccacctcagcctcctgagtagctgggactacaggtgcacgccaccatgcctagctagttttctttgttttttgtagagatgaggtcttattatgttgtctaggctggtctcaaactcctggactcaagcagtccttccaccttggcctcccaaagtactggggttatagatgtgagccaccatgttcagcctgtaaatgcatttttaacttataatactttcaacttatgatagttttattgagacttaaccccattacaagtcaaggagcatctgtagtctcttggacttactcttggcagaggcccacttctaaaaccatgtttaactctggaatgtaatccaataaacacttgatagatattaatagttgtaccaaaatatcagtgtggaaataatggaattttgctttggtaataaggaattgagaatcttggggttggaaggtagtttgaactatctctagtgcatttaggcatctggggttagatttggagggtacccttgaccctcctggctctgctctggtattccctgaggaggaaagaaggttgcagctaatacagaaagccgatgatcaacaggtgataatagatgaagggaaaaaaactttaacatgttttgagcacttcaacagtgttgctttggttaattttttttttttttttttttgagatggagtctagctctgttgccaggcggagtgcagtggcatgatcttggttcactgcaacttccgcctcctgggttcaagcaattctcctgcctcagcctgcaagtagctgggactacaggtgcacgccaccgtgcccagctaatttttgtatttttagtagagatggggtttcaccatgttggccaggatagtctcaatctcttgacctcatggtctgcctgccttggcctcccaaagtgcttggattataggcatgagccaccgcgccctgctgctttggtcacttttatatgagtatgttgcacaatgagagaaaaaccatcagtttttcaagcaagaaagtgggaatatcctctttaacaactgttcctaactttatttttgaatttaggatttcagctaaagtattgctattgtctcttgatttcttaagctttaaatttttaccacaatgagactatggataaatagctactataactcaagcagtatgttatgtactaggaaccatgatagaaaaatcatagttcctgtcctcaaagatcttacagttcagtgcaagatacagatatgaaaattgatcatgggaatacattatggcaagggctgtgagaggggtttgcatagagtactacataagcccagaggtgggacagccaacttagggcagcactcccacaatgatgaagtcttttttgttgttgttgagacagaatctcgctctgtcgcccaggctggagtgcagtggcatgatcttggttcactgcagcttccgcctcctgggttcaaggaattctcctgccccagcctcccaagtagctgggattacaggcgagcaccaccatacctggctattttttgtatttttagtagagacagggtttcaccgtgttgtccaggcttgtcttaaactcctgatctcaagtgatctgcccgcctcggcctcccaaagtgctgggattacaggcgtgagccgccgtgcccagctgcacactgagatgtcttaaaggctctgataggaatttacaagttgaaagatgggaatatgttattctcggcagatggaacagcatatgctaaggaaaagacataatgtttgtaggaagtataattgaccatgccctagacacctgaaaactaaatattcaaaacagctaggaaatgcgtaagcactgagtctctttctggttatcatacctcatgaccacagagttgcacaactccaggggtaccatttacaatgtcagcaatgtaaggtggtcctccctagagcacaaggtagatcatattgtgaaaggaggccccttggagatgtacaaatggataaccttgctctgtgctaacttttctcacccgaaagtttggaaattttcagttttcttctttagagaatctataagatttcttcagattttttttttttttaaatatacgttggggggtgcagccgtgagagagtgaggctgacaccgcgccctggcctgtgcatcccgccctctgaaaaaaaaattaattaattaaaataaaatatactttagagaggattttgactgttctcaccacaaagaaatgacaagtgtttgagatatggatatgctaattattttgatttcatcattacacaatgtatacgtctatcagaacatcacagtatactctataaatatgtacacttacatgtcaattaaaacaaaactaagactgctaggggcttacacggagggaattgagccagcatcaccacgatggtgttgttggagagtgagcagttcctgacggagctgaccagacttttccagaagtgctggacatcgggcagcatctatatcaccttgaagaagtatggtggtggaaccaaacccgttccaaagaaaggttctgtggagggctttgagccctcagacaagtgtctgttaagagctatcgatgggaaaaagaaggtcagcactgtggtgagctccaaccaagtgaataagtttcagatggcttattcaaacctaccgagtgctaacatggatgggctgaagaaaagggacaaaaagaacaaaagtaagaagaccaaagcagcagcacagtaaagggcacaaatttcctgctttcaccaattaaccactgaattgttattttttcctttggtttttacttttggccacatagctaggtttctggttcccctacactaggtgttttcacataagatgtagggtccttttgcaaagaatagttgcaatgtttatagggcagttgtggtaagaatctagtttattttacatttggctaattggtctgtactgcatggttatatactcctggattatagattaaaagtctctgtagtcatctctgtgaagagcaagctatgattaaacatgtctctttataaaaaaaaaagcacaaaaaaactaaaacatatctacatatattttttaaaaatgctttaatttcagctttgaattttccttcatttcctttgtcctcaggttggagatataaaagggctgctgagtgcctcagaataggtttttctatccaaaaaacttaaaatgctgcattcctgctttacctttatgaatctattatgacagtgccagagagggtaataagaaagaaaaaaaaatcggccccttaagaaaggaaatcgttttgtttgttgttatatctttggtaatagaatatctgttttatggtgggttagaaaaagggaagaatgagaggatgcagttaatatttataaagcactctgtaccacggatcatgttaagtgcttcacatgcattatctcacctattcctcaccacagtgttatgaggaatgtgctactagtattttccttttcaataggtcaggaaacaggcttggagaaaataacttgcccaagatgccacagctagttggtatggtggagtggagttgaatcaagttcagtcctaattccagaacctaaacttattaatgctgtactacattacatctgtatacctgagctaggctcttttgcttatattttatttaattaaatagatattttaaggatttgttggattttgtgaaatatgaagaggaggaggagcgatattctgataaattatatggataggaagtaaaacagatttccatcttttttctttattttcttttaaaattgggatcagattccagtcctgttcgaaatctgcagtcttttggcactgaggagcctgcttactctaccagaagagtgacccgtagtcagcagcagcctaccccagtgacaccgaaaaaataccctcttcggcagactcgttcatctggttcagaaactgagcaagtggttgatttttcagatagaggtgagtgggtatggtatgacttagacctattacagagcatctgggtgaaattctttttaaggagggcttggggccactgcaggtagatgcctaatacttcagctagatgaatgctgtttgcttgcttcctttcttatgtctttttttttttttttgagacggagtctcgctctattgcccaggctggagtgcagtggtgcaatcttggctcactgcaagctctgcctcccgggttcacgccattctcctgcctcagcctcctgagtagctgggactacaggcgcctgccaccacgccaggctaattttttgtatttttagtagagacggggtttcactgtgttagtcaggatggtctcgatctcctgacctcgtgatccacccgcctcagcctcccaaagtgctgggattacaggtataagccaccatgcccagcctcctttcttatacattgctgaggacagtttgatatcagaatattctcaaggtccagagtagctggagtatattaaatcgtacctgtaataggaaaaagagactgggcccttcttaaccacatttgaaaagggcttgaagcagacttttcttatagccatacttctcagtccatttatctccaaatttcttaatgcagaggtcacagactggtgaactacttctagctgtccgcatggttggttggtttgcttgcacagtgtttaaaattttttaaatttgttgctagtatttgaaaacacaatgatttcatataaaaacctggattaatagtttattttaaacaatgaaaagatctgggaacactgggcggccaatcacccatagtaataattggctggagttgaatagtagttgtcccctttagatggacaatgagctgtctctttggccttgctgagcccctgtaggcatttggtttgcaattcctgatttagagtctggaatttcaagattgaattgttagactacaaacaggctcactcaagactctaagtccattcacatcttacaccaagcctgttcagtgtcatccagaaagataatcactgtcacttatcttctgtcctgtgtatctcctggaagggaagtgggatagtaatgttttaaaaacgtatttccatctagttttgattatccatgattagcaactcaggagaaatacagataggtgtaatagatgaagtacaaatttaattttaatcagaatttaaagttgcacaaaatggatggtgtagaagtgcctcttcattttccatttagccatctagcagatgaatagctgaaagttactggttaaatcatagaaaaagaacctgggaagcccataaactctgaatagtaaacttctaaataaatgaactccactcataacttctaccaattgcttttgctttagaaactaaaaatacagctgatcatgatgagtcaccgcctcgaactccaactggaaatgcgccttcttctgagtctgacatagacatctccagccccaatgtatctcacgatgagagcattgccaaggacatgtccctgaaggactcaggcagtgatctctctcatcgccccaagcgccgtcgcttccatgaaagctacaacttcaatatgaagtgtcctacaccaggctgtaactctctaggtcagtgtgccctagcttcatgacatcctttgttctgtggttctctctcccaggatcatccagaaatgttttgtgttctgttgggatttagcttcttaggctcttcagtggtcatgtgctgagtgataatgagttgctcacttgaataaaagcatttatcttcttggccgatggtccataataatagatctggttgtaaggaaattaactatgatgagccattcagtttatcctagagcttttcccagtgaaaaattccctcattttcctagcaaaagcaaaaaagactatctgcagatatcttactgcatggcacatagctcgtactcagtgaggactagttaaggataaggtagtgcagaatagtggttgcacggccatagctgttaaggaaatgagaaaaacatttcctgtcaagaggctgtgaaattaggagtacacatgagaccctggccttctgtaactttagtagcttaggttccttgctttgtgtacttagtaagtatgaacaagataaaatatttcttctgtgataaataagtatcttattatattcttatgagttttaccccttagtgaattactttagagattcttgtggtttgaaccttatttgtgcaccttcagtgagctgaggtgcaaatattgggcttaaggttttgtctagagttggaagatgctgattgggaggtaaggggcctttcactactgggtctacttctcaaattcaccctttgcatgtggctatcaagtttgaaaaaccgtagaacagagtaaattgctgcttggcaggccaacagtacacttcctgtagtgtgttttgtttgtttgtttgtttttgagatggagtcttgctctattgcccaggctggagtgcagtggtgtgatctcggctcactgcaacctccgcctcccaggttcaagcgattctcctgcttcaacctcctgagtagttgggattacagatgcccacaaccacacctaacttttgtatttttagtagagatggggtttcgccatgttggtcaggctggtctcgaactcctgacctcatgatctgcacgccttggcctcccagagtgctgggattacaggcatgagccttttgtttgtttttatagagagacaggggtctcactttattgcccaggcagaggtgcagtggcatgatcatagctcactgcagccttaactcctaggcttaagtgatcctcccatctcagcctcccaagtagctgggactacaggcacgtggctttcaagcttggcttttttttttttttcttgttttttagtaatgaggtttttgctgtgttgttcaggttggtcttcaactcctgggctcaagcaatcctccccactcagcctgctgagtagctgggactacaagcgtgagccaccatgcccagtggttttctgtagtgtttaattaatttggattgtttcctggcctttttttttttttttttttgagactgagtctcgctctgtcccccaggctggagtgcagtggcgcgatctcggctcactgcaagctccgcctcccgggttcacaccattctcctgcctcagcctctcgagtagctgggactacaggcgcctgccaccatgcccggctaattttttatatttttagtagagatggggattcaccgtgttagccaggatggtctcgatctcctgacctcgtgatccgcccgccttggcctcccaaagtgctgggattacaggcatgagccaccacgcctggccatttcctggtcttacagcagtttctcagataatttcaaaccatcggaataaatacagcaaagttgtcttgaactccataccagttgtcactcgaagataattgtttcaggcctgcattgatttccttggaataaataatgagaaaaactaagaaagacaatatattacactagtagatgatatgatggctaatgtgctttaagagtttaaggggatctgcttgccatgcatcaagaaaaggaattttcctctgcttctgcttgttactaaccatgcattgctaaattgttaattttatgtactatatttggtcattcatgcagcaaatatttactgaatattggtcatgtgccagatactgttttaagttatgaggatgtagctatgaacaagtcaaagtctctgccctcatggagcttatagtctagctgagaaaggcaaatagatagacgtgtaatatatcaactggagataaatgctgtgaaggaaaatgaaactgggagtactgagggtaggatattgtgtgtgtatatacatacatatgtgtatgtatatgtgacatatatatgtagttggctaggaaaagctgctgtgatatggtcacatttgagcggagacttgctgttggaatatttgagaataagcattatgggtaaggagaacagcaagtgctctgggcaagagaatagttaaccagtttgaggaacacttagaggccaatatacctggggcagaatgaccagaacggagaggaggagataggtcagaatggggcctgattgtgttatttatgcccaggagttaacctcttaatggggtagaccatagggtaaataaaaaatatgttgtattagaggaaagtttacttgtatttgtttatttatttattttggagacagagtctcactctataattaccaggctggagtacagtggcgtggtcactcactgcaacttccgcctcccgggctcaagtgattctcatgcgtcagctgcctgagtagctggggattacaggcatgtgccaccacgcctggctaatttttgtattttttagtagagacagggctttgtcatgttggctaggctggtctcaaactcttgggctcaagtgaaaaagtttactttgactttggttttaatgtattggaactttgaaaaatatgaacccgagcttccaaagtatcctttttttttgaggcagagtctcactctgtcacctaggctggagtgcagtggtgcaatctcagctcactgcaacctccacctcccaggcttaattgatcctccaacctcagcctcccaagtagctgggactacaggcacatgccaccatgctcagctaatatttgtatttattgtagagacagggtttcaccatgttgcccaggctggtcttgaactcctgggctcaagtgaccctcccacctcagcctcccaaagtgttgggattacaggcgtgagccactgcaccgggccccaaaatattcttgaccctagtctattccttaagagttttatgtacttgtgaaaaattaaaactctataggaaagtttgaagtgcattaagtaaaaattgcccttaactcatacccgcagaactgtgccacagatacaaaacttctgtttgcagttttctatgaatgcttccaagaagtttttctacatatataagcacacgtatatgtacacatatttcctttttgtgattattcataaaacggaaaataggatacatttgttcgttgtacatcttggatatttgtatttagaggcttgtctttttaaaagatacagagaatttcattatattgatagtttataaattatttaaattgtctcattgacatttagattgtttctcatttttagcttttttgaacaatattgtaatgggtagccttgtatgtacatattttggtgtctttctagcaaatctgtaggataaattcagagcagtggaatttttaggtcaatagatcagctgttccttttttactgtagataatagattggttttatttaacatataaaagaaaacatgccctgaataaattactaagaagtatggatatgcctgggtgcggtggctcatgcatgtaatcccagtactttgggaggccgaggtgggcagatcacctgaggtcaggaattcgagaccaacctggccaagatggtgaaaccccatctctattaaaaatacaaaattagccaggcgtggtggcggcgcttgtaatcccagctactggggaggctgaggcaggagaattgcttgaaccttgggaggtggtggttgcagtgagctgagattggccattgcactccagcctgggcaacaaaaggagtgaaactccatctcaaaaaaaaaaaaaagacgtatggatacatagtatctgaaaagcaagtcttgcagtattaatgacattactttttttgagacagggtctctctgtcacctaggctggagtatggtggtgtgaccatgactcactgcagccttgacttcctgggcttaagtgatcctggcacctcagccttctgagtagccaggactacgggcatggactaccgtgcctggctaattatttttctttttgtagaaatggagtctcactatgtatgtcacccaggctggcctcaagctcttggaatcacatagtcctcctgtgttggcctcccaaagtgctgggattacaggtgtgagccactgagcccagctgatgctacattgtatgtatggtatttgatcagtgaggatggtttttcgtgttcaagataattttgcggacctctaaaattgcattttttttttttctgagacggaatcttgctctgttgcccaggctggagtgcaatgatgtgatcttggctcactatagcctctgcctcccaggttcaagcgatttgcctgcctcagcctcctgagtagctgggattacaggcatgcatcaccatgctggtctaatttttatatttttttaagtagagatggagtctcaccatgttggccaggctgacctcaggtgatctacctgcctcggcctcccaaagtgctaggattacaggtgtgagccaccgtgcctggccctaaaattgcatttttaaaatttatttattttattttatttttttgagatggagtctcgctttgtcacccaggcaggagtgcagtggtgcaatctcggctcaccgcaagctccgcctcccgggttcacaccattctcctgcctcagcctcccgagtagctgggactacaggcacccgccaccacacccggctaattttttgtatttttagtagagacggggtttcaccgtgttagccagaatggtctcgatctcctgacctcgtgatccgcctgcctcgccctcccaaagtgctgtgattacaagtgtgagccactgcgcccggcctaaaattgcatttttaataatacagtcccggagaaatgatggcctgaatgtcctaaaatcacccattcaccagtacttggactgttttttccttttaaagtttattctataaattatgttgtgtaagctttaaactccactttcttctttaccccaaattaaatgtcttttttttttttttttatgaaagatgaagatttttgtagacttgctattcaggttagctaactttttatctcattagcattgtcctatgacccctttcaatcttaggtgttttataaaccttttggttgaagagaaatatataaaaaggaaataatgttcaattccctgtgtgttttcaaaaaaaccaaatgaaaaatagatgaatgggccgggcgcggtggctcacgcctgtaatcccagcactttgggaggctgaggcgggcagatcacgaggtcaggagatcgagaccatcctggctaacatggtgaaaccccatctctactaaaaatacaaaaaattagccgggcgtggcggcaggcgcctgtagtcccagctactcaggaggctgaggcgggagaatggcgtgaacccaggaggcggaacttgcagtgagccgagatcgcatcactgcactccagtctgggcaacagagcgagactccgtctcaaaaaaaaaaaaaagaaaaatacatgaatgaagagatacccatttaaataaaacaagctttcgtgttttgttattcctaacatttttacgtcttcagaaggccttgtgttactgcctgtttcaggcgtggctcatgcctgtaatcctagcactttgggaggcggaggcaggaagattgcttgagtccaggagttcaagaccagcctgggcaacactgagacccgtttctacaaaaaattttaaaatgggcccagcgtgatgttgtgagcctgtagtcccagctacttgggaggctgaagtgggaggatcacttgagcccaggagttcaaggctgctttgagccatggttgcaccactgcattccagcctaggtgacataaaaaaattttttaaagtaaaaaaatctgattatagaagaatcctaaatctttaagcaaaactcagttctccctccaaaaaataagtatttaatctggtttaaagttatgtaagtatgtttacttatatgatagaaaaggccgcttctccatttttcataaatttgagtattgaaaggggttaaattcaggttggataacattgcacagtagaaagaaaagtacacttattctacatataacctgattaatttagtataggagagttacattccaccaaaagaaagtgttcctgttcatagtcttgggctttaattacaaatgttgacttcgtgacattttgagatttgagaagtctaagagcagaaagaattatagtttatattgatcatacataagcatgttcaaagactgccagatccatcctgtggaagaaaagaatgagtgtaagttatagccctaccagccttatgtttggtggattcagtctgatcagacatatatttgataaaaatgatgtagcaaaaaaacaggtttgtcttagagaaacatactactttctaagcttgtcttctttcttgagattaagttttccctcctttaacaggacaccttacaggaaaacatgagagacatttctccatctcaggatgcccactgtatcataacctctcagctgacgaatgcaaggtaattgtgctctcatttattcaacacatgcttattgagtgcttaccgtttgccaggcactttgctgaacactggggatacagtggccaacaagatgggtagggtccttgttcttacattgtagtggaggaaacataaaaaacaatgtgcttttttagaaaaaactagttaaacagacaaaagaattgtaatatgtaatgagtgctttgagagaagttaacaaggagattatgaaacgtttggaacatcagccactagtgcattgatattttctgttgaaaattggcttcgaagactgctagggacttattgcactaaggaataacttgcataaatatgtgatcttaatatttatgcattcggttctcttctcataaatctatgaagtcattttgcttttaaaaacctttcataattcttgttcctttttctgtccatttctgtgaaatactttttgttactctcagtcacacctacttttggctaattcatcttttaaattcttgaaacctagctcctaaataacctttgggattttgagataatgtatttaagtagaagctcagatcccatttgtgcgttcttgtgtgggttgctgttcccaaggatggaaccgaagatctaattatggggaagcaagagtggaaaatgttattaattaaatggattgcttgagtagtattggacaggttatctaagctggttagaccaaagtattattgttgtttttgttgttactttgctagtgacaccagggtcacaggtttattcctgtctgagccaatttcattgtgaggaaaattagattccctagctaacattaattttccttgattcagaatttgttctcttatttacaggtagaccgcaggggtgaaagtttcttttgtgtggttagtctttcagcaaagtagtgtactttccgtgcttatatggattttaaggtcaatgaccctactcttatttttcttcattccaaatcattttataagtggcaattccttctgctctgtgtaaaagtgagttgtagatcttcccattgtcctcccattattctgggactaaatcaaaacagaaaaagctgtgcccacatctatgtcagaagcaggaaaggcttcaggtacttctttctcagaaaataactgcgatccctgctttttgagagttgtcctctaccacttgtctctaaatacaatgatctgatactatggatggttttacataaaaatcttcctgagatgtcttttgcttttgaaattgttagtttgtagcaatatgaccatgtaacgttaagcagtttattttagaaaaagaaaaatttcagtttggtgaagaaaattctgaccaaaggaaaacatttctatcttgaatttatcctctttgttctctcttctttgcaaggggcattaggcgcagaataatccatctttactactggaacatgtgcatggaggatcaggagaatttctgagatgatatatttttattacatttagaaccctaagtggaaagattagacaaattccccacatttattaacagctctagtgtttttgaagaacctgcatatacatgattgctcttgagtttcccaggacacccttgcgatcagtgatgttacatttgtattcagtcatatatttctgtagctgcatgtgccaaatacaggtatctgaggattcagtgaataaaagactgcatttaaggagctcatgttctcacagggggaggcaacataaaccttcaaattaataagtaaataattttgtgtagtgataaatattgtgaggaaaaaaagacgaatgatatagagagagtctgtttcgggggtgagggtagggatagcactgcttttcccaggatggtcctggaagacattcctgaggagatggcatttgatctgggacgtgaatgatggcaaagaagcagttgtgtaaagatctagaagaaaagatatcttaagtagaagcaacagcaagtgcagaggccatgaggcgcggctaaactgatgggtttgagaggctgaatgaaagtaggccgtgtatggctggatccagatcataaaggaccttgtggaccttggcacaggagtatatttttgttctgatagaatgagaagcatttggggggctttaacaaaggcatgacaggatttcaggcacgcttttgaaaactgaagacttgttaacgtggagaatggagtgtgggggcaagagttgatgcagggtatagggtgcttgggaaactgcatggaagttcaggcagtagttggtggactggactagctttgtatcggcagcaattctaagactaggttggattcaggatacgttttagaggggagcaacccgttaggcttgctgattgatttgatgtgaggtgtgagaaaagagaagaatctaggataacattcaagttgttgactggatcagctatttagacagtattgccatttattaatactgggaagatttggggtagagcagatttgtggagaaatgccagtcgttctgttttgaccattctgagttttagtggtgaagtggaataagcagttggatatcagttcccaattcccagattatgaaacagaaactgttgagagctgatgtgatttgtctgaggtcatgtaactacagaattaagtttccctggagacttgaacccaggttttctttttttttttttttttttttgagacagtctcgctctgtcacccaggctggagtgcattggtgcaatctcagctcactgcagtctcagcctcctagattcaagcaattctcatgcctcagcctcaagtagctgggattacaggtgtgcgccaccacgcctggctagtttttgtatttttagtaaagacggggtttcaccatgttgcccaggctggtcttgaactcctggcctcaagtgatctgcccaccttggcttcccaaagtgctgggattacagatataaggcactgcatgtggccaagcccaggttttctttctttctttctttctttctttttttttttttttaagacagagtctcactctgttgtccaggctggagtgcagtggtgcgatctcggctcactgcaacttctacctcccgggttcaagcagttctcctgcctcagcctcccgagtagcggggatcacaggcgcctgccaccatgcctggctaattttttgtatttttaatagagacggggtttcaccatgttggccaggctggtctcaaactcctgaccttagctaatctgcccgcctcagcctcccaaagtgctgggattacaggcgtgaggcaccacacccagcccaaacccaggttttctaatgttttctttgtacttccatactctattcttgcacttcctcatgcttttttaatttatttattgtactttgagaagagtccaggctcagagtcatcagacatgattaaaaccttagtgatcccatcatttagctggatcatttcaacttctctgatcctgttattggctgagaaggcagaatgtgaatcttgcattatctctttcttgtagagattgtgacaataagtgtgaagaccctttgaaagtaaagtacaacataaatccaaggcattatcattgtattcttatgctttaagtaaacgtagtcttagaagcaggtggatttattgacgttgttgatggttgcaggtgagagcacagagccgggataagcagatagaagaaaggatgctgtctcacaggcaagatgacaacaacaggcatgcaaccaggcaccaggtatgggccttgttaaagcactggccattcatagtttgaggtccgtttcttggatctcctctataattgtcttcaggcatgtctgtgcctcatttcctgtggtatatcttccagatgtaaacttagaatcatgtttgtttttcaaacagtaaattttcataaaacaaacacttctacctcatgaatgaaggaatcatgctatctacagtagtagtaatagtagtagcagtagtagtagtagataattctgattatttgaaagattacacttgctgcttcatttcctcacttcgcatcctttaagactattgtagctttcaaacctctccactctgctagcacctttccaaggccaccagtgacttttccccagcatttgacacttgctgactgtgttatttgtcttctacttatctcttcccttggtttgtagggagcatcctggcttggtcctaaacctcctcctgcctctctgaacattcctgccacattggttcacttacttccttgttcttccctaaatgcctttggtcttcactcttcctgttttcctgcctggaacgctatacctgtaccaagaacagatggtattttctttcaaggcccgtgcagttctcagctgttggaggaatttttcccaaattctctcccaccgttaaggaatttcttccttatgtattcccattgtagtgctctcaaaatgttagcctttgtgacatattatattttgttcatcatttaggtgtctgtttttgcagttagattatagttggatagcagagatatatggtgatgaggaagaagtttgactttggagccaaacagatgtgaatttgaatactgattatttaactctagctatgttgtcccgggcaggtcaactaacctatttctttgttaataagaagaggtgaataatgcctacctggcaggggagtcagctaaattatgtatgtaaagtacctatacccagtgcttggcaggtaaaaagcactccataagtggtaactacacttttcttcgttgtctatcttaggtttaatttaatttaatttatttattttttagacagagtttcactctttttgccccggctggagtgcagtggtgtgatctcagctcactgcaacctccatctcccaggttcaagtgattctcttgcctcagtctcccaagtagctgggattacaggggcacgccaccacgcccagctaatttttgtatttttagtagagacagggtttcaccatgttggccaggctggtcttaaactcctgacctccagtaatccacctgccttggcctcccaaagtgctgggattataagcatgagccacggtgcccaaccttgggttttattcttattcagtttttctatttaaattaatacatataaatgaatttttgtaccactgttgatcagatcaataagcattaattggaaaacagtaagcattctataaatgattagttgaaatgatcttaattttattcttgttgctttggtggagacgtctatccttagtttatgttagtagtaaaataagtttgtattcctgaacctatatttaactggcagtaaaggtggtgggtgatgagaacctgatttggaatttttaaattgccatattcatgaaaaatttagctgggcgtggtggtgtacacctgtagtcccagttacatggaagactgaggcaggaggatggcttgagcacaggaggtagaggttgcagtgagccgcgatcgtgccgctgcatttcagcctaggtgacagagcgagaccctgcctcaaaaataatacaaatgaataaaataaaattgccatatgatttgcattgtggctagaaaatttctggcatttttttctctttaaaatttttttacatgttttggtaccttcttttttttttttgtttttgtgccagagtctcgctctgtctcccaggctggagtgcagtggcatgactggctcactgcaacctctgcctcccaggttcaggtgattctcccacctcagcctcccgagtagctgggattacaggcgtgcaccaccatgcctggctaatttttgtatttttaatagagatgaggattcaccatgttgtccaggctggtcttgaactcctgatctcaggtggtctgcctgccttggcctcccaaagtgctgagattacaggcgtgagctactgtgccgggccttggcactttcattttgaagcttagctttataaggagttttctctcagttttctcctttttccttttaggcaccaacggagagacagcttcgatataaggaaaaagtggctgaactcaggaagaaaagaaattctggactgagcaaagaacagaaagagaaatatatggtgagggaaagttaaatatttaatgagcatgaactcctgctatcacatttgattccttttgctttctgagcttctgcctttcagatttgccatttagtattctccacatgtgaataccaattgactcttctatggcacttagagtttatttcatcccccaaaactgaattgttgagagtggaaacaggaggtcttgggaaaatgaaatacaattagaatttaaattttaaaaaatttgatcctctagttgttcataaattttactttcatcttaaagggttaaatttacccgctagaacacatgccatggcactggaaatgtctgtatgaagaaaaatattcaagcttaatagtagtctgcttattttaatggaaaaatagatttcctccatgattaaaaggtattaattgggtgaatattctgtaatagaccttcttgtagtattttaacatttttttctaactttagaagtaatgtacatttgtaagagaatttagagtgattaagcaaagtatatggaagaaaacaaatcctactacctaaaaatagccacagttagtgtttttggatatatcctagctttttcacaatctcttatttacataattaccttcttactgtatgtagcactttgaattctgtgttttcgcttaaaaatcttttttttttttttttttttgagacagtcggccaggctggagtgcagtggcacaatctcggctcactacaacctctgcctcctgggctcaagtaattctcccgcctcagcctcccgagtagctaggattacagacatgtgccaccacgcccagctaatttgtgtatttttagtagagacggggttttaccatgttggccaggctggtctcgaactcctgacctcaggtaatctgcccacctcggcctcccaaagtgttgggattacaggcgtgagccaccatgcccggccttaaacatctttttttaggaaaagattttattataaatgtattaatacatgcttactactgaaaataccaaaaatatagagaagaaacattccaataaaaaaaaattgtccttcaagatacaaaccactgcttaacattttgatgtgtgttctttcacagtctttttctttttctttctttttgagacagagtcttgctctgtcaccaaggctgaaggctggaggctggagtgcagtggtgcgatcttggctcactgtaacctctgcctcctgggttcaagcagttctctgcctcagcctcccaagtagctgggattacaggcgcccaccaccacacccggctaatttttgtatttttagtagagatggggtttcaccatgttggccaggctggtcttgaactcctgacctcgtgatccacccgcctcggcctcccgaagtgctgggattataggcatgagccactgcacccagccttttttttttttttttttttttttaaatttatttattttaaattttagataagggtgtacatgtgcaggtttgttacatagatctattgtgtgatgctcagatttaggcttctaatgatcttatcctgtcacccaagtagtgaacatagtgataggtagtttttcaacccttgtccgcctccccactcttggaatcctcagtgtttattgttcccttctttgtgtccctctgtacccagtggttagctcccacttataagtgagaacatgctgtgtttggttttctgtttttgtgttaatttgcttaagataatggcctccagttgcatccatgtcgctgcaaaggacatgatttcattcttttttatggctgctcttttagatttttttctgacattttagtttttttcatagaattggaatgttttcttattcagccattgggatagattcttaaacatagggcatgtgaatacttagtcagagcatggcttcactaagacaaaaatatgccagactatgcatagttgacccttcgtatccatggattttgttcctgtggattcaaccaaccacggatcggaaatattccgggaaaaaaatgtggtttgtactgaatgtgtacagactttttcttgtcattatttctgaaatagtagtgttaacagctatttacatggcattgacatcacattataagtaatctagagatgacttaaagtatactgctggatgtgcccaggttatatgcaaatatgacatcatttacatacgagacttgagcatccatggattttgttatatgcagggaggttgtgggggcgttcctggaactggtcccccagggatatcaagagatgactgtatttccttttttttttttttgaggcggagtttttgagacagagtctcactctgtcacccaggctggagtgcagcagtggtgcaatcacagctcactgcaacctctgcctcctgggttctgggttcaagcaattctcctgcctcagcctcctgagtagctggaataataggtgtgggccaccacacccagctgatttttgtaattttagtagagacagggttttaccatgttgcccaggctggtctcaaactcctgacctcaagtgatttgcccacttcggcctcccaaggtgctaggattacaggtgtgagccagcacacctggcctgtatttacttttttgacagtcatcactgtcttaaatgctaattttatgaatacatggacataggccaatgtaagatgggttgtggggtgaatttgtagttagacctttacaccagactgtgttggtttgtacagtgagggctttagtagtgggctatagggtaccagattgtttgcttgccccagtcttgttcactgtttccatctgcaaacttgttagaagggtaataagacaatgataccgtatattgagtgattagtgctaggcactgtgattgtgacgttcctttgatcttttaacagtccagtatgattggtgatatttcccatattttatatacaggaaaactaagactgagagaggtaacttacctaaaatcatacaggcagaaagagtgtctgaagtaaaagttcttgaaatttttaaccttaacaaacatctgctctgctttttagtaatttgggataggttattaggacccaacctccttgattaaaatgctggctaggacttttttcaagcttttttttttccagtgttcctcaaaatagaagaaataactaatgcgtagaacccaaatcttagatgatagagtccaaatttaaaaagattcacagcagatggaatcagattaaccggaagaaattttaatagggataaagatactgatgaatggtctcttcatatggtaatatgtgtgtgaaatctataatgttttcctgagataagccatccactccacttaactaccattatctcctattctctggatgggaggtggagcctacaacagagtgggaagggctgaaatcaaaggcttaaaagggaagtttcctttgtagaatctctttcctggaaaggattcttgtagtgactgccatggtaagattagggaattatttaagactggattattctcatgcttttaattttctatggctttcacctgtcttattcttgcttaatatttagtaagtcatttttagagagtccagcctatttttctgtgtatgtggactggagtttgagggtagcacgccttttgcagacagcataatggtggctggagcaattcaagtgaaagaagttacaaaggactgcttcatccagctgcccctgcccctcccttcctgcagattttcttttgagtctaaaatcttagacactaaggcttagaaaatctggtttttgtttgttttgtttttaaatcggggagtatctaccaaagctccttccaaatctcaggattctgggaatttgtagtgtctctgggtttgttgtactttatttatttgtactgtcatgtaaatttttacatgaaggaacagcgttctgatccacaaagtgtatcttttcagagatagaagaatgaagctcccttctggagctgtgggagcatttcctctccagaatcactggggtgggtagtgggagtcttgtggcattaacctgataagtagtatgtcttgtgctcaatccctagcacctagtatgtaggcactaaataaatagcttatggttgtgtggtttgcatggattgaaatgaaatagattaaaaagttcttagaagcagagagtatcagagtatcacgctctggttattttcctaggaacacagacagacctatgggaacacacgggaacctcttttagaaaacctgacaagcgagtatgacttggatcttttccgaagagcacaagcccgggcttcagaggatttggtgagtattaaaacctccaaactgaaggccgcttgtgaaaggtgcttagagttgccaggaaaaatgattgcaaatcagtttgatgggaattaaatgtaccttgcttctggaatctctttccctgtctcccagctgtccctttttggagactagccttccctttcagatttaaaatgaatcacccctcctcccttcctttttttattccctgctttccacctcggctcccggaagtaccagtttggctagagctgatgaggctggataaaaccataggcgcccctttgtctcagctgggcaatttgcaattctgagaacctgtagcctaggagagactcatctctgttgttttcttaatcccaacaggaactccccttttgctaggtttcctctgcactaagaatgaaaataacagtgaagaggaataatggaaaaggctgttgtcagatgttttagaattaatctttgacacagccaagtttgatacattggttttccattctgatatttatttagagctagtttatactgagttgctgtcctaggcagaatttttaacaactttgcttgaagaaaattctggtgattgagtttacctctgatataacagattaaatgtgttcagggaagctcagttttaaagtgaatctcgtcttcacccccttcccccttgtattaaaaaaaaattgtatcaaatactagacttgttgaaaacttggcagaggcagggtttgctggctacccttggctgggatgggctgttactgctgctggttttctctatcctattctggcatggagcatttcctgggctagccttttacaactttacacctggttatgcttacaaattatacttttgtagccaactcagagccactgaatggagatggatatccgaattttttttttttctgagacagggttttgccctgttgcccaaactggagtgcagtggtgccatcatggctcactgcagcctcgaccttcagtgctcaagcgattctcccacgtcagcctcctgagtagctgggactacaggcatgccactacacccatcccagaaatattttctgccttctagagtttagattctagaattatcatgcacatttcaaaaatattttttaaagggcctgtttttttttctaagtgaccattgtggatatatttcacggagattcatatagctttataaaagcttctgcagataagtaaggcagattctaaatcaagttttttgtttagttttagaatactttataagggtggggagtttgtatctgtgatgattttctttataattcagtttggtctaggctgataaaaatgaagtttccaaggtatcattctggtgaggcccagaatgtgggaggtagcagagaaacctctcttttgagacctgtgctctgggcagtatgggtagtaagttttctgtacacctgtgtgatttttcatgtagctctctttagtgtaaattctcatggatagaagccaaatctgtctgatttttttcatagcctagcgtggtggcatgcacacacacttttaaaaacaaagataatatttatttttttaaaaaggagtttcgctctgtctcccaggctggagtgcagtagtgcgatctcggttcaccgcagcctctgcctcttgggcgattcttctgccttagcctcccaagtagctgggattacaattgtttgccaccacaccttgctaattgttgtatttttagtagagatggggttttgccatttcggccaggctggtctcgaactcctggccttaagtgacctgcctgcctcagcctcccaaagtgttgggattacaggagccactgtgccctgtctaaaagcaaagataataaattctgatcctcctttgacttttgatttcttggcaataggagaagttaaggctgcaaggccaaatcacagagggaagcaacatgattaaaacaattgcttttggccgctatgagcttgatacctggtatcattctccatatcctgaagaatatgcacggctgggacgtctctatatgtgtgaattctgtttaaaatatatgaagagccaaacgatactccgccggcacatggtgagttgtcttgggttcctctgccttgaccatgatggcaataagctgtaggatctctagattttgccatagcgatggcatctgttcaggcaccttctcagtggtcctcagcagtgggatgaaggcataggaaatgacaggccacagcttaaggcggggtatagagcctgaggtatggcttgtgctgggtgccacccaaagcagctgagggcccttacccacatcctgtcatgtacatcttcttgtcttttgttcttgctgcctactgctcttcatttcctccttggaatatgaattacctctgcccacaggttttgtgtgtcccaaactagatgaaaatacagacttcattaggcacagcagagacagcatggctcaccttcatatccctagcaactagtgtggacaactgatgcccaagaagtatatgttgaatgggtacttattaatatttaatagtgatcagcctgtgacagattatgaaagtagcagagtgggtcctttggtgccttcccctctttttcctaataaaacaggtataaggagttgaatctgttattgttgacaaataggtttactagattttttgcagcttcaaaaaaaaagccatttttcccccgctctgttacagaataagctttgtcttaaggggaatttctgccatggagcaagggtgcggaacaggggaaggagtagagattagcctttcaggcagagaagactttttcttgttttttttttttttgagagggagtcttgctctgttgaccaggctggagtgcagtggcgcgatcttggctcactgcaacctccgcctcccagattcaaacgattctcctgcctcagcctcctgagtacctgggactacagtcgcacaccaccacacctggctgatttttgtatttttagtagagacagggtttcaccatattgaccaggatggtcttgatctcctgacctcatgatccacccacctcagcttcccaaagtgctgggattacaggcatgagccactgtgcccagcccttgttctcataatcacaatataatttggctctaaggcctctggggtgtctctttttccttccccttccttttttatttcccaggatttccatatgttgagcatctatgacccaggtttcctgtgatttctgtcattatactcttctccccagtttggttggtgataactgcttttttatgttcccagttcaggagcatgtggtctgtaagttcagggcccagaactgttgctttgactcaggttctccagaccctggcacacttgactgcatagggctagagtcatggaggggaggtgattggcggcgattggtagaaatatcagtgcacaggaaataatggggtcagaaggtggggcactgatacagatggcaggccgtggagataaagtaaaatggttttactgtgtgaaagcgggtatttttattgatgtgaactgcttaccatttatgccttttttccttttcgtttctggttgttgagtgacacaaaccaatgaaatagccaaaagggcaagaaatagtaatagaaggagaaaacaaagagtctgaataaatctgagaatcaaataaacattctgaatatttgaaaatcttccatattatatgatataaaaatcagatttcaggaaatacctaatttattccatgcctgttcttattcccgttgcttcaggtgtgatcactgaaatgaaatgatcttcctttggcttggcttctgtttctgaacaaataataattgttacatgagtttggttattgttgggaagagccagcatgagtaaaggggtagagataggaacaaactacagatggaattttcttggatggattccagttaataaatatttggatttacatatgacaaattggaacatgcttcttgagttgacaaaaagagttgcagtaaatttgcttaatagaaagtgtttcatgggccaggtgcggtggctcatacctgtaatcccagcactttgggaggctgaagtgggaggattgcttgaggccaggaatttgagaccagcctgggcaaaatagtgagactctgttgcttcaaaacccttttgaaaaattaactaaccaggcatggcgccatgcgcctataatcttagctacatgggaggatcttttgagcccaggagttcgaggctgcagtgagctatgatcgtgctatttcagcctgggtgacagagtgacaccctatctcaaaaaaaaaaacttttttttatacgtctatactttttaaacacttttttcttttttttttttgagacagagtctcgctctgtcacttaggctggagtgcagtggtgcaatgtcggctcactgcagcctccacctcccggattcttctgcctcagcctccagagtagctgggattacaggcccccgctgccacacctggctaatatttgtatttttagtagagacggggtttcaccatgttggccaggctgctgtcaaactcctgacctcaggtgatctgcccacctcagcctcccaaagtgctgggattacaggcgtgagccaccgcatcaggccttaaacattttaaaatgtaaaccttttgaagaattcacctaacagcagatggctggctggctggctgcattaaaacagtaagcacttgagggtgaggaaaagggggtactttgtgctcccttgtggccaagtgaccctagcttcctgctgctcagctaggctgcttgccttttttttttttttttttttttctttttttgccacaggactttctcttaatttccttatataacaaagggaatgcacttgcaggggagaagggcagacaggtagtggtacatggtttttatcattgtgagtgggttttctaatctgaacaaagaaggccatcatggttaggtggtaatgagaagttatgggtaaaggtgagagtaaagtacttagccaccctaagctgctggaaataagctgcttaagaatttcctgttggcttgaggcatttggtaataagcaagcgtattgttatttatttggcctttatgtagtgggtgattttaatctcctgggctaaagtagtgccagaatgtaatccagaatacttgttccagattgctataaaagtgtcataaatatattcaaatgactttggaagcctttgttttatggaaataaaatctctgttttgctgtatgttctcagcttgtccaactgtccggtagctcagttaaccacatttgacctgtcattccttttcccttttgaggagcagtcttgttgggaggctttggttccctgatgtgaatttcattgtcttgcaggccaaatgtgtgtggaaacacccacctggtgatgagatatatcgcaaaggttcaatctctgtgtttgaagtggatggcaagaaaaacaaggtaaaaagtggtgactttagaaaggagttgaaatgttgtatattcacaggtttcagaaggcatatgttttttctccatcacaccttgtgaaggacatagaactcttctcttgccaaaatacacaatgtgtttcattaataattatggtatgtttgtgaattttaggcctttatctgtttaggaatcagtggcccacacatgaactctgtttctctgcttccagatctactgccaaaacctgtgcctgttggccaaactttttctggaccacaagacattatattatgatgtggagcccttcctgttctatgttatgacagaggcggacaacactggctgtcacctgattggatatttttctaaggtaagcaggatctggagattaagaagccaatggccagagcagggtgatccatgttcgcagttgggggctcaaatcactgacaggaagaagctgtactctgggcaatgatgacaccccttccttaaattaaaaaaaaaaaaaaggcaaacccatgtatcaaagattgtttaatgaaaatgcagtttttattaaaagcttctggttcattcatttctagaattgtggactggagctgcctattaataactggccagagccctccctagtaactcacaagcccacatcttgtagtcaaaccagttctgctggctttgcctgcctctatgttattagcttaaaaccaggaatatactctttttgcctgattgtttagctgggctccttctagcacagtgccttcagtgataacactactgcgccttttaaagacccaaggccagattttttttttttttctgacagagtctcactctgttgcccaggctggagtacagaggtatgaccttgactcactgcaccctctgcctcccaggttcaagtgaccctcctgcctcagcctcctgagtagctgggataacaggcgcctgccaccacgcccagctaattttttgtgtgattttagtagagatggtgttttaccatgttggccaggctggtctcgaactcctgacctcaagtaatccactcgccttagcctcctaaagtgctaggattacaggtgtgagccattgcgcccggcctaagtcataaaagtttatgacttttagtataacaactttattgaaatataattcatataccataaattcacgcactgaaagggtacaatttagtggtttatagtgtattcacagagttgtgcaatcaacccagtttgcattatcctgaaaagaaattgatagcaatcactcctatttctactcaatccctctcagttcttctttctctataaatttccctattttggacgtttcctacaagtggaatcacacattttgatttgattcaatgtgattttttttttaatccctttgcagaatggggacttacagtggtgtttccttcccttctcttccagtaggcagctccttttcaaaaattgcgtttaaagtgggcttctatatactgagtcagcagtcttaaacttcttgccctactctgtggctgtcaggagcccagagtcagcctccttaaaatgacactggaggtctcaactagggaaatcctgggatgattaatggctttggccatgataaagggtgtggttataacagctgtgagcctggcagccactccttgggactggttagccagatgttttgcaagcagccttattttgcatctgtggaagtgctgaaacctttggtttcaaatcctcatgacgtgttcatctgtttgctcttgattttaggaaaagaattcattcctcaactacaacgtctcctgtatccttactatgcctcagtacatgagacagggctatggcaagatgcttattgatttcagtaagtgaaactgctaagtcattagttccacaaggcagggaccatgtgaatattgtttgtctttttgtcctgtggtctctgcaattcctggaatatagtgaaggtacatggatatttagtaaatgaatgaacaagtaggaaaaacctgaacattgtcattctgcctaatacacattgaacattgaaggagtacaggactcctccttaatgagtaggaggtacagaggatgataaagtaagctctttaggattatcccagtttgagacttttaaacagcacatacatgcatgaggcttaaaatctggtccttgatgctagggatttcacttttgtagggacttgtctagaggtaatccatgtacccaatggaccctgtgcataatatactctgccctcattaattgtggattctgtctttgtgaatttgcttactcactaaattttatttgtaaccccaaaatcaatcttaacatttttgtggtcattcgtgaacatgcacagagcagcaaaaagtaagagtcatggatgcacacattcccagctgacttcagagttttcagctcttacactgtaaacaagttcattttcagtctgggaatgccacatggttttcgccttctgttgattttaaatggcccctatgagtagtactgatgtgtctggtgttcctaatctcaggaatacctggggtaccttacaggggttaggtagctttcttcaggtgaattagagagttgctggcagtgagttcaatgttaatgatatcaacagtgtatattaaataaggcatttttaaacagaaacataaaataagtttatgtattgatggttgaccaatatgtgaccagaggcttgcaggaacctaaccctccctgtatttcccgtaggagtagtggttcaatattcactaattcaggttctcagtgactttataaaacataactgctgtgaataacaagactctactgtgtgttattctatatttgatgtccactgtcataggacagggtatattgtaatcaaaattggaattcctagaattagccttccaagccttctttctttctttctttcttttttgagacggaattttgctcttgttgcccaggctggagcacaatggcccaatgttggctcactgcaacctccgtctcccgggttcaggcaattctactgcctcagcctcacgagtagctgggattacaggcatgtgccaccacgcccagctaattttgtatttttttagtggagacggagtttctccatgttggtcaggctggtctcgaactcccgagctcaggtgatccgcccacctcagcctcccagagtgctggaattacaggcgtgagccaccttgcccggccaccttctttcatttttaagtcacctgagaagagatgaactgggaagtgacataagaggggaactatatatctttgaataggtaacactgttcttataaacttgattttatagaaatttttaagcattaacaaaagtataataaatgcttctatacccatcacccagcttcagtaattaccgttttttggggggctaatcttgttttacctacattttcacttgccattattttggtatctctaaaagataaggtctattacaccttaaaaaaaaaagtccttcatgtcataaattgtgatattcaaatttccctggtgtgattttgttcttttttttatttttatttttttaatactcagatccaggtagaattgatagtgggattgagaaatgtggctcataattcacttttagtctaaaactttccactcccatcatttttttcttgctgtgtttttgttgaagaaagcaggttagttgtctaaaagggttccccagattatgaactttgcacactgcatctccatagtgttgttttatatattttgtataaattgaatgttaggtgtttagactttacaactagaggcttcatcatttgggttttttacaccccgcactatctcataggtggtactgagctaatctgttcttaccattcaaagatttaaaaaatacttaaaaactaggtagtgaagtggcttcacatttttgtttctcatctcccttgtttccaacacacacctacagagattcattatcaaaataatggtgaaggcttccagagttcttttagtgcctattacagtagtgccctccttatctgccatttcactttctgcagtttcaattacctgtagtcaactgcggtccaaaaataggtgagtacagtacaataagatattttgagagacagacaaccttcacataacttttattacagtatattgttataattgttctgttttactattactctcttcctgttcttaatttataagttaaactgtagcatagatatgtgttgataggaaaatacatagtatatataggatttggtactacccacagttttgggcctccactgggagttttggaacacattccctgtgaataagaggggactcctgtgtcatgtaaatgcaaatacacattcttccccttttgtttatacaaaggcagtatactatagttaaccacacagtattccattgaatgactaaatcctaatggagtggactgtgcttcttaaaccttcttccatgttggcacacagttttttgctattaggataagatcgagtgttgctagaaaaagtctgtatttgttccctggcaggttatttgctttccaaagtcgaagaaaaagttggctccccagaacgtccactctcagatctggggcttataagctatcgcagttactggaaagaagtacttctccgctacctgcataattttcaaggcaaagagatttctatcaaaggttggtttttgactccttggaatggttgattgttacccaagaagttaactctactgggtattgtgtttcccctgaatgtgagaacggaaggcccactgaatatggaccactgcggagaccctcactaaagctgcctaggaatccaaagcatttggcccctgggaatggttattaattggcttctcaaatccagagttgccaacactttaattcttataaaagtcaagaagcaaaacttcagatcgtttggttcatctttctgagaaagacatccctgtgtatttatgcaagggtggaacaatttagtttgatctatatttgatcctgatttctaaggggccaagagtagcttcttgctgtaatatccttttgtggttatttggactggtcaaatgaatactttgtaaactccttctaaacagattgggttgagtacagaagattctgtccatttggatttcctttaagggaaagtagaccttggttgggggcaaaggggtgggaacctgcactttggccaggttgtcagtacttcttctgtttcagaaatcagtcaggagacggctgtgaatcctgtggacattgtcagcactctgcaagcccttcagatgctcaaatactggaagggaaaacacctagttttaaagagacaggtaaggttctcatcaggggcttgctcattgctggatgtccttcaagacttagcagagcaaagtatgggccttaagactggagaaccttcccttaaaggagttgggctacacgccccttttactgggtctcatttctgtagctggcagtgatgcctgtgttgccttatccttatcagaaggttttgataagctcctgtctcaaatttggatgacacaagttaagcagctccagttaagcagctttatgttgtacagcatttctgtcatttgatgtttttcttaggtgggaggaaattgcccatctgtagaggaatcttcacaaatgctgtctcaactcaaactcacatctaattttttaaattatttcatatatacaataaaggtcggtgagcgatgattttcatttctcactgagggtaaagtaggaagaatggattagataggaaagcagtttataagtcaaaatatagtattttttttgataccctaatatgttgttaaacctttggcaattccttcttggcggttagttattttggaatctatgtaaaggcacttgagttgaaagtatgtaatcctttttcccattgttctccctcaggacctgattgatgagtggatagccaaagaggccaaaaggtccaactccaataaaaccatggatcccagctgcttaaaatggacccctcccaagggcacttaaagtgacctgtcattccgagccagcgaaccccagcagtaggaatccgtaccctagggatctgtctgtcatttctctgttgctcttgtgattggcaagtacagtatcctttgggaaggccatccccctcaggactgtcctggctccgacctttgtgtacactgcagacgctggttctgaggaactgttgtttcggcctcagtgaggttgcctggatgggatctgtattagacttgagtgcaggtctctcagcactgacccaaggagttctgttatggtactgtacctgtccagtcactggttctctcctcatgtcctctcgccccatgaggttgtgttgtgtcttctaagcgtggtactagtgcttgccacctggtcaccagacctccaaatatggctgccaccaccaggacctttccagttactccttatatgtgtgttctatggaggggcagggaaaaggtggcacttgtgagtgtgtgtggattggcagggggtccattcactttgggttccatcttgctttaaatttcttcattttgattaagagacctctttttgatctgtattgggctaaccagagccaaatacttttgaagagtttcccagggactagtcatggtaatagcatataattgatctgaatgagatggagagaagaatgaaggggtggtggttctgggtttgatttgagttcacctgtgggcagtgggcagtgggcagtgtcttggtgaaagggaacggatactactttttgcctcaccgtaaagtactcactagtaaatatttccttctctctttactcccactttttacgtttgcaggtgccaaagtaatgtccacttttccctttcatgctgcatattaactggttaattatactgcagaaaccttttcacctccactagtctgatacagtacatctgtacttccatataccttgcactgattttgtctgagtgccctgggagaagtagaaaatgattgaaagtgacttccgtatctcagcccatgactcagcaaggcagaatggccacccctgccaaagtttgcttctcttttcaacagtgcctcaccctccctctaggattaaagtgcttctgcccttccacgaactcctcctccatttcctttttgggatttgtcaccatccttctattctctggtcttctatttttggtgttgttcaagtgaaggaagagatgttccctctaatttctctctagcccattataacctgctatcttggggcaacttttgatgtatgacatgtcacccttcccaacttggtctcctccaacatgctgtcttcatgtggagccctcaccacaatccctgactccggtcatttgtgcctttctcttgtcatctctgtacactacttatattcactgtgggttgggggagctaattttaagcatgttcagtggcagctcccctccagtttcagtgtcactgttaaaatttatcaaaaagcaacttcactaggggttttcttaagggataaaggccttttacagaagctaaacccttccccacatgtggtagaatgtgctcttctatatctactcctcaataaagcatgttctctgctcaagtctgtttcatctgggggctctcatttatatatgaaaatgatgcacacgatctgctactaatagtaaatgcacttgggatttgctttccctagcagtaaactgttgagggatgtggtttgtggctatggaatgtttttccctgtgatacaggctgtctgtaaagatcaagggagtgctcactctgaacttctctagatggtggcacaaatttgatctgcctcactttggttccagctaatcagtatacgtagcaatgattagtcagtattacccattctttcactaagtgccattttccactgattttaggggcaaaggaaccaataggaaattaggatatatgggggtacagttgatgcctgtaggagatgggaacagacattccttctcatctccaagctcattcaccagtattgagcagtgtcacctctaattattgactctctcgcaggttgaaattattctttttgaaaatagctgcattttcatgtaagatatacccagcacaggaaaagggtggctgagcactaacctccgtatggtggaaaggaggaggctgggaattgtatgtgctggaatggtttcactcactgtgaccagtagtggtgagaacccatacagttgaagttttttgcacagtcctgatcccaggtctccactcgctttgccatcccactttactccctaaaaataaaaggatttattatctcatttaaacccccacaggtgtggaaacagagtttcacttgccttggcaactttgcatgagactatcccatttcattccgtttttttttttttgagtcagagtctggctctgttgcccaggttggagtgcagtggcgcagttttggctcacaacctctgcctcccgggttcaagtgattcttctgtctcagccttccgaatagctgggattacaggtgcctgtcaccatgcccagctaatttttgtatttttagtagagacagggtttcgtcatgttggtcaggctgatctcgaactcctgacctcaggtgatccgcccaccttggcctcccaaagtgctgggattacaggcgtgagccactgcacccgacctatttttttttttttttttttttttttttttaaaaaaagacagtctcactctatcatccagtccggaatgcagtggcatgatctcagctcactgcaatgtctgcctcctggattccagtgattctcctgcctcagcctctcaagtagctgggattacaggtgcaggccacctggctaatttttgtatgtttagtagagacagggttttgccatgttggccaggccagtctcaaactcttgacctcaagtgatcacccgcctcatcctcccaaagtgctgggattacagccgtgagcctctgcacccagcttttaactccctcttatctgcataacagaagcttagctgcttaagctcctttattagaagagcaaaagtctgaaattattcctgaaacctgctcaatggaagtacctactctattggttgcttcccatatggttgtcactgtaccttcatactgcctcatttgaccctcatattagccctgtacagtagatgggtacactggtttgccaaaggagacctggaatccaaggtggaagtaagcagcaaagccagaaacttcaattctggtctgtctaccttgatagcctgcaccctcccctctaccgttttcttccactatttttgattccttaatgatgaatcatcctctcccttctagttggatttgtttctaatggcttccattacaaggataataatgaaactggtgaaaactttcaggcaaaaggattttctttttatattttttcttattattttttaattattaaccaaattaactcattacagtaaaaaggactgatttttaagccagctgtgatagctctgtaatagtctgtaatctcagcactttgggaggccaaggcgggcagatcgcttgagtccaggaattcgagactagcctgggcagcatggtgaaaccccagctctacaaaaaatagaaaaatcagacgtgggcacatgcctgtagtctcagctacttgggaggctgaggcacgagaatcgcctgaacctgggaggcagaagttgcaatgagctgagatgatgccactgcactccagcctgggtgacagagtgagaccctgtctcaaaaacaaaaaacagaattgattgatgttagttggctttagaagcagcaagtttagggggctacagagctaaaccaggaagcaaaagatgtgcctcattctggcattgtttctgatttaggaataaactgttcagtaagcactgtccctttacttccatggttttcttcattcctcaccacagcacagtaaggtggatattatagtcttcttctagatgaaaaattgaggctcatagtggtcttgctgctgtgtcatagcaatagaatgagagagccttgcttccctgagtccaaatcccatacttttggcattgttatgaggtctggtcacctgatgcttccatgctattttcccatttcttatctggggataatgagtcatattaagtaatttttttttttgagacggagtttcgttctgtcacccaggctggagtgcagtggtgcgatcttggctcactgcaagctctgcctcccgggttcatgccattcttctgcttcagtctcccgagtagctgggactacaggtgcccaccaccacgcccagctaattttttgtatttttagtagaatgaggtttcaccgtgttagccaggatgatctcgatctcctgacctcgtgatccactcgcctcagcctcccaaagtgctgggattacaggcgtgagccattgcacccagccattttttttttttttaagacgacgtctcactctgtcacctatgctggagtgcagtggcgtgatctaggctcattgcaacctctgcctcccaggttcaagcgattttcctgcctcagcctcccaagtagctgggattacaggtgcccaccacctcgcctggctaatttttgtatttttagtagagatgaggttttgccctgttggctaggttggtcttgaactcctgacctcaggtgatccactcacctcagcctcccaaagtgctgggattacaggcaggagccactgcgcccagccaagtaacttttaacagtgtggtataacctttaaatgacaaggtgatgcttttgacttgtcctcaactttgatttgtactgatttgtccctatagttctgggtggggtgggtcaaaacaaagtctcgagctgtaccaggatcaagcagcacagctcagccatgatccttttaccacttttttcttctgtccttgagactctaattaaagcactggatttttaaaaatcacccttgtaaatatgcacacatttgtctatagttgaggaaattgtgccgttgaagtccattcttggacatggagttaagaaaccctggtttgagaaaaagccccagtgagacagcaggaatccttttaccatacaaccctcaactagtttagtgtgctcaagctcaaataaccaatcccatcaagtgaaaagaatggcagcagggagaaggcctggctcactgaggctctcagcattagtttcctctacctcttgtgtctcacaggtgcacatatgtacagcatatcaaagtgttgaatgtcatgagaataaaatatgaaaactactttgctgaatgatagtatgtgatgtgtgctaggacttctagaagccaccctttgctttgctgttcattgggatcatggaatcggacctcagctggttttgcctcagcactttctttcacaaaattatgtgtgactgcctcctccagactgtttcctgctgataggggcagtttaatagccttcttcctgtgtggtatctgcaacaaaatcccaatgaatgtcaccaagaaggaaacaaaggattgcccagcgatgagaaatgtccctggtgccaaaacatcagtttgcccctaacctcttgtgcaatacctttaagtccaggtcatgttgttaccatttgggggtttgcggatttgtttacttgtgcccaagaatggagaaaataacctgtactattgtacaactctggctccatggctcctcacaaatgttccatgtgagatataaacatctttatcctcgacaagtcatgttcattccaagaaaccagtctttgttcttaattggacatttgtttctgcaaacagcttaccatacattcaattccaaagttatcagaaacctacactcttatctcacaaatttagaggtgtggtagatcatctccaaagatggccaccaacagttgctctcatcctctgtgcacgtgctatttccaataaggtctatttttttctacagtgagggctgaacttgtgacttgttttgactaataggatatggaagtgatattttggcagcttccacttttgctcttgaaaataagctgacacgtttccaaacgagaagcttgggctaaattactgaatggtgagagacgatgcataggagaaccaaggtgctctagtcacagcactaaaagcccagacttgtgtctcttgaaggtttcaaccccgccagactcccagctgaacgcaccctcatgagtggcccttgctggtaccacatgacactaaagacatctagctgagtcctgttaacccagagaattatgagaatactgttttaaccacacgttttggaatggtttgatacatggcaatggagaagtgaaacaaggggacttcggaaactaaagggctggaattcagtttgccttgtaggttgattggaagccagatgtgcctagaggaaggctaccaccttgtgcaattccaggggacactgtttatgttccgtgtaaatggcagcctcagttcacctcatttggttatttatcgtgtcttcgctgtcagtcaaattgcttctgagataactggctggccttggaattcttagccacctccttaagcggatcaggaaaactgaagaatatccttctgtatgtatgtatgtatttattgattgatcgatttatgagacagggtctccttctgtcacccaggctggagtgcagtggtacgatcacggctcactgctgcgtcgccttcccaggctccagctatcctcccacctcaacctccagagtagttgagaccacaggcgtgcactaccacgcccggctacctttttgtattttcagtagagacgaggtttcgccgtgttgcccaggctggttcaagcggagctcaagcaatcagcctgcctcggcctcccaaagtgttgggattacaggcatgagccgctgcgcccaaccttcttctgctgtcgagatactgctcatcacctgcctgctccagaattcatgtggcttctcattgctcaatggattaagttcatgtttatcctggctttcaagtctttccgtaagctgactcaacctacatagctttcatcattcccttacacataacctcaacgtgcaacaggattagtctattattccctttcttgtgtttactgagaaagcctccacttcaacgttccatgaagtgtgttccattaaataccaaagtataggcaaaaagttctgtggtcaaataaatttggaaaacacagagtgtttccaaagttagtatcaggccaggcatggtgggaggatcacttgagcccaggagttcgagaccagcctgggcaacatagggagacccaatccctacaaaaaaattagttgggcatggtggtgtgcacccgtagtgccagctactcaggaggctgaggtaggaggatcacctgagcccaggaagtcaaggctgtggtcagctgagatcccaccagtgtgctccagcctgggtgacagagcaagaccctgtctcaaaaaataaaaaaataaagataataccagtatgtttcttgacttgaagatttcccaaaaccttcagtaggctaatgggtgttggagttttccaagaagacacaggatgtaacatttcctaaaatgatttgatctggaaggagcctcttggactggtgtcctgggtagggcttttggaaatgtttctttcccacccgaataggcccctaattctgcttgagacttgtctgaactatcatggcatagaccaagtgtggggcttgatgtatgtgaagtcaagccaccgtagcctaaatcctggctgtcatttcctttgtaacttcaagcaaatggcttatccacattggcagaatggggataaaattgtggaaaattctcttgcagtgcttgccatgtattcattcatgtagtcagtaaacaagttctgctgtgtccaccatctaaggtgggaattagttgagtctggggaaccagtggtaagccctgtctaaaaaagggcctttatcatgggagctgaaagatgagttagcaggatgggggcaatatggagtagagggactggggcagtgtccagatcccagagcaggccagcatttggtgtgtgtgtctgagagagcctggtggcgagtgtgacaacacagaggagagggattagagagcacggggccctggaggtttctgcaagaatgtcaagtgtatgctaggacaccgttggactgtggccgacaaggaatggacgcgatcctatttcccattttaaaatgtcactctctggtggacaaacgctgggggtggctggctggcaggagggtggaaagcaaggaggtctgccaggaggctactgccctccaagacaagggaggagggtggctgctaccaacagtgacaagatggcaagtagtaggtggactcaagatggattgtggaaggttcatcagctaggggataatgagttaggtgtgaggaattgaggggaactcccaggtttgtagctgggtgtgtggaggtgccgtttgtagagatgcggaagatggtgaggagtagttttggggcagtggatcaacagttcagtgtatggacaggttgagtgagaactttgggacgtgttcagtaagtagcagctgctactatttatttcagttacttgtattaagtttggctctctaacgagactccttgaggacaggaaatgtgagtccgtcacaatgctctccagggacctctcatgtgccaagcactattgttggcgctgagggcacaaatataataagatgtggtctgtgttattccgaaaccctgttttgcaggggaggtaaatcattaattataacatcaacattgtaacatacaggaagtgctgaatgaaagaacttgtaaggcatttcgggaatgccaaggagggaatggacgagtgtttcctgggctggaaaacctttacagagaaatggatcttggcaaagaattcactcaccaggatggaaagaatggcatgtgcagaagccagaagcaggagtgaacgtggtgagcttgagaaagataggactggggagcagaaggcggaatttgcgtccgttagtacatcttggctctcctataatactgtgaggtcttcaagggcaaattccaatctcacacttcattcatatccccagtcccatcggagttcctagtgaaatgctggcacatagatgaaactgtttggtgagttcacttttttcctaaatgtccccgacttcaaacacaagaatgaggtcttcagccctctttgctggtgctttgagttgggttattgcagtgaaccacctcttggcacctcgccggtggctgggtggggtggggcaggcaccggggatgcctggtgggttaggaggttaggagtgggtgagatgggaagtacattaactggaaaattctgcagcagtgtcagagttccaaggaggaggcttgcactggcccccactcccatattcattgctggacatgatggtaaggtgtgaagatggagaaaacggggccctggggtttattagggtctcacagtgaatagtcagtcttgggagagagactacctcactacaggttaagtgcaaggactcttcctgcctatgctggtgccatttggcctcctccttgcagccacctttgttgtctctaaagccttttctggcacccacaggagggtcctgccctctgtaccagcacgcctgcttccccctccaggctggagtgcagtggtgcgatcttggcttacaacacccacctcccgggttcaagcgattcttctgcctcagcctcccaagtagctgggactacaggtgcacgccaccatgcccagctaatttttatatacttagtagtgatggggtttcactatgttggccagacaggtctcgaactcctgacctcgtgatctgcctgcctcagcctcccaaagtgctgggattacaggcatgagccaccgtgccccgcccccttccttttaaacatagcccagctcccagctccctccacctgcctgcaaagaatcaaacacccagaaaaactcctaacctgttttcttttttttttagagagagggacacagaagctaaatgctttgtagcctagtggattaatgagcctcctttactgctggacccacacacaattcccagtgcattccttggttcagcacctccacatttaggacctaggtttgcctccaggatttcatgctggctcatgtgctgctttctaaggggtcctctgtgtcccacctgcctataaactgctagtgcagggacagttgcctcctcagtctggggctccctgaggttgggagctgttttgctcttctaaggtgctcaagaatggggctgtgtcttaatcacaaggcagttagttgaagggtcaccttatacaagacaactgaataacctgggaccctgttctctgagtcaggagacacatggatttgagcccttgagatcatgtctgtgagtagggagagggtgtcttctttcaggctggggcttcagaggaccctaaagggaagaaagaccccttgttttcaaatcccttcccttccaaaatgcctgcaataccttcccatcccgtcgtgggctctttcctgtttctgtcattcttacctgtgtcccaagcctgttttcccacctgggggtaggaccagggctgttcagtatttctctgcgattctgcaaaagggctcttggcctgttgacataccagtgaggccactgaacagactacagagcccaggccattcctgccctctgctgtgcaccagagaaggagccattcactggtcactcatttattgagtgcctactgtgtgctaggcacaggatacagagtgtgcgagtctcctcactgctgtgcagtgagatgccaactctgagtgtgagggagggcagagtcagtgcagcttgctacggcgaagctgtgcatttatgcaggactgctgcttgacactgagagtccaggaagaagcccagtgggttcagtgtgggccttgtgtgaagtgccagcgatgaggacaggagacacagagaagagagttggcctgccggcttgtcagctgtgacatccaggtaggaagaagcggcaccgtgtcctctgggaagtctgtggtgggggcttttactctgaaccttgggcctcatcctctctgcctggggagagtttggtatatgaaccatggttagtcgggggtcttgtctggctcctccacccttagaagtcttccctagttgcattgaaggccttcatcttcctaacccctctctcctttctggagatatctagggcaatgggattacaggctcatctgtcatatcttccattattcaattgctaatgtctccagagcatggatggagcccaccctcagttaccctctttaaaggtggggaaggctatccaagagtcctgggaacatggcgggtgacatggactaggaagcaggagacacagtttagtcctggctctgttatcggctcactgtgtgactttgggccagtagctttccatctctgaaaaatgatgactgactcctagtattcctgcccacaccatgcatggaggaacattcatctctatttgttattgaggtgacttccatggctattgaatggaatgagtcgagcaggtgttctttcaggggtgctagggaggcgaggggtccagaagtctgcagctccggtggaagaggttaggcactagggaaggcagactggagctcagtgtctgtgacctgccggggcgcccactgcccgctcacttgagctgtgacctttccccaacctgattgatttatctactttcatgcctggtcccctgaaaccatttggggacgtggcctctgctagaaagtgtgaactgataactgcttatggtgttattcctcccagagtgatctgcacttatttacagtggttgaaggcagaaaatctctgaagactaaaggcatgaccctctaatgatcaatgattagtgtaacgatcaacgattagagctttgcaaacagtgagggaatgggggatgttccaaggtctggaaaactaggcatcagtccctgtggtttcagctggccctgaggggcaggggtgggggcagggcagagtgtgcctgggtgtgtcatgggtggggagggtgcagcttctgggccatagcgatttcaatcttgggaccacctccttgcactcgactgcctcccctgggggcctccccatgatggcttgtggggagcctgtctgtctagctgcccagcccccatcttgcagactggcagcaaagtgtctggccattttcccatgatgcccttgcaaccaccagcggctcttgcctaccttctgtgaacaggcttctcttgcccaggaggccctggaacgtgtgttccagctgatatgctggtggtgggagagagaagtggtagaggagagaggcagcagaggtaggctgttttgggaaccagggaaggacaaaggacagggccagggcgagggccggggccagggctggggccttgcaaatgggatcatttctctgtcatcccgagaggcgaggaaacaccgtggactgattaatttattcactagttcattcgttgattccctcctccccctcctccattctccctctgctctcccttcacaaacgcctggtggtgcttctaacaggcagaaactgctgggaactggagatacagaggcgacagcagacctgatgcctgcctgttggggggcttccagtctggggacaccagccagctatgtgacccagcaagacagtgtagtgcagtgtgccaggaacagggtcgcactaggccatggagacaagctctgtctgtgtacggcaggcagtcagggaaggagagctggttaggatggggctaggagtcaggtcagtgaggcaggcctgaaggatgcggtgagtcgcattaggggactagacttggtcctgagagcgctgagggagtggagggtacaggttggttacttttctttctttctttttttttgaatggagtctcgctcttgtcgcccagcctggaatgcagtggcgtgatctcggctcactgcaacctctgcctcccgggttcaagcgattctcctgcctcagcctcctgagtagctgggatgacaggcacccgccaccacaccggactaatttttatatttttagtagagacagggtttcaccacgttggccaggctggtctcgaactcctgacctcaggtgatccacctgcctcggcttcccaaaatgctgggattataggcgtgagccaccacacccacctggccagttggtatattttcttttgattttgtttttcgcttttcactgaaagatttaagcagagtagtggcttcttagatttgtactttttttttttttttttttttttttgagacagagtctccctctgtcacccaggctggactcggctcactgcaacccctgcctcctgggttcaagtgattttccagcctcagcttctgaagtagctgggaccacaggcacctgccactacaccgggctaatgtttgcatttttagttgtattttgtatttttagtcgccatgttggccaggctggtctcgaactcctgacctcaagtgatctggctgccttggcctcccaaagtgctgagattacaggcatgagccactgcctggtccagatttgcacttttaagatcatctggtgatctttaagcactcttatctctagtggttgacttttttttttttttttttttttctaattccaggctttagacgtaaggtaattttgaaacgctggtcgaactagatccatcactgtctattcctatccctgcagccgctccttaggaccacccctcttaaggaaacaaccagaaagcctagcatggccaaaccacactggccccacctctgcacagcaatgccagcctggcttgcccctggccagagcatctcccctcacccacctggtttgtttgtgctgaggacaactcagccctccctagggggcatgttgaaggcaggtttgggcaatacttacctttttttctccttggctggatcagaggtcttcctgggggaaggagaaggaatgaggactacggactgcactgcttccctgggggcttggtgaggtggaaaaggctccagttctttgagggttggtgcattggtgggtcttcagtagaattctagtcatccccagttatcctctgtggcagtaggaatgtgctggtagggggcagtgtggagtggctggaagtgcacagactttggggtcactggcacctggtgccagctgggtgggcatccttgggaaaagtgcttaacctatctgagccttagtttccccgcttgtgataagggggatattattgtggagatttaatcttttttttttttttttttttttttgagagtctcactctgtcgcccaggctggagtgcagtggtgcgatctcggctcactgcaagctccgcctcccaggttcacgccattctcctgcctcagcctcccgagtagccaggactacaggcgcccgccaccacgcccggctaatttttttgtatttttagtagagatggggtttcaccacattagccaggatggtctcgatctcctgacctcatgatcttcccacctcagcctcatagtaggtgctcaagaagtattttctctgacattcccatcccccatccttcatgagttgttggatttggaaaagaagtttgaaatgggccgggcgcgttggctcacacctgtaatcccagcactttgggagtctgaggtgggcgaatcacgaggtcaggaattcgagaccagcccggccaacatagtgaaaccccatctctactaaaaatacaaaaaattagccaggcatggtggctgatgcctgtaatctcaactacttgggaggctgaggcaggagaattgcttgaacccgggaggcagaggttgtagtgagctgagattgcgccattgcactccagcccgggtgacagtgtaagactccatctcaaaaaaaaaaagaagtttgaaatggctcagttcagaactcattttgtagaagaggaaactaaggccaaaagtgcttggtcacaagttggttttctctatttttatatgtgtattttttttttattacaaaagcagtccttgaatacatccactattttgaaaaggtttgtacaagtaaaatttaaagtctctcttccctttctcccccctcatctccacttctgtccttgaagtaaccactgtttacagtttgatatttatccttctagaactttccccatgcatttgcatatctgtgtgtatgtcgttttttaaaaacaagtaggctcctcttgaatattgatctgtaacatgctttttcccacttaaccatgtatcttggagatctttccacatctttctatgggtctgcctcattctctttaatggccacaagggttaaggatacgtgtaatagattttgaccattccctgattgatggtgtttatgttatttccgaattcttgctattacaagcatgttggcagtgaataccctcagggctcatgtagtaacagcatgtctgcctgaaaagcgagactctgggtcagaaaggtaagcacatttccaacttgcctggatattgcgaacgtgtcctccaaatagacagtgtaaaagtgccagttttttcacaccaagccaacacggagcattaccacttaaaaaatgtaatattgacaataagagaaaactgctctgtgtgcagagtattttctcctggtcccccaaggacaggactcctgagttgaaagtgccttcagggaacacaggtttaagttagtaattttgtttcagccaaagaaaattgactagaaagcttggcttgtggctttgcccacatccagactggtctctagcttcactgccactccccagagtcatccagagcatggaaggcaccactcagggtgcagagcctgtgcccccacccttcaggtgcccgtgctccccattgttgggaacagccttgtttacacttgttgcctggcgtaattactaacactccccaaagtgtcctggttgcatgctaatttctttttttgagatggagtctcgctttgtcgcccaggctggagtgtagtggcatgatcttggctcactgcaacctctgcctcccaggttcaagcaattctactgcctcagcctcctgagtagctgggattacaggcacgtgccaccatgtctgtctaatttttgtatttttaatagagatggggtttcaccatgttggtcaggctggtctcaaactcctgaccttaagtgatgtacccacctcggcctgccaaagtgctgggattacagacatgagccactgccccccagcctggatgataattcctatggacagtctgtgccaccccatctcatgagcgacccctactggactggagtacctgaccccagttactgggctttgacttagggcctctgctttatgttgcagaacccactcagaacccctgcttgctgggctccattgtcattgtcactcacctcccactcgcttccccatcagcccaaagaactggcttgccttgcccgtcttcacctcctgcagctggagctgaatgctggggccagcgccttcctgaagaagcagagagttagtgttagagttgggaggttgtccagcagacgggaggccagcctgggcaatggcaatctcaggagtgacagctggtggtcagcagagacttgctgtgcactggcactgggcacctcagcatattttacacagtactgcacatctttgtaataatagctaacatttcacctactatgttctgagcacgttgatctagtaactaatttaaacctcaccaaaacaccaggaaaacagtaccctaagtactgttactgtcattttacacatgaaaacaccgagacacaggttaaagaattgttcagctgggcgcagtggctcacacctgtaatcccggcactctgggaggccgagatgggtgggtcgcttgaggtcaggagttcgagaccagcctggccaacatggtgaaaccccgtctctaataaaaatacaaaaattagctgggcatggtggtagacacctgtaatcccagctactcaggaggctgaggcaggagaattgcttgaacctgggaggcagaggctgcagtgagccaagatcctgcccctgcactccagcctaggtgacagagcaagactccatttcaaaaagaaagaattgtccaaggtcacccagctgggaagtgagaggtggaaccagaagttgaactcaggctcaaaggctggtctgaaacactgcagtcataatctcatttaatcttcacaaccaccataactagtagaaactatgatttcccccggcccctgcattttacagatggagaaactgagatgtaaggaggttaagtgacttgtccaaggtcacacgggaagaggctgagccaagattcaaagtctgacttcacagtactggttctgctctatcatgggaagtgtctccaacatagatgaggagagggcagccagtgaactcacggtgggtccccaggaggcaaggcaggactgcttcccctccttatccccactcacctctcttccccaggcacttcccccattgtcccagattttccttgccttagagcctgggcctcccggaaggaagtggcatgtggtctgggggtggaggctattaccctgggcaaagacattttaatcgttgtgctgatggcatcctcaaccaaggactgtggattgacattctcattcttccattagcctctgtgaccttggccaaagccttctccctctctgaccttaacctgaacttctgaactggggcttgctcagttctgctgaaagggagtcgctccctagttgagagagtgacagtgggtaacattcattagactgtcttcacatgtctgtatccccagctcctggcactgagccttgcacacataggagcccagcacacatgggacacagaatgccaaatgaggagtcctttctctgagagtctgggaatagggagggggctggggagtccccttttccaggaaagctaaagatagacaaacagagccctagagtaatgcgagccgcctgccaggagctgggagctgggcttggatcagaggctctttcttccatccccagtttccctaggggtagcgctggagctcctgggaccagcaggaacctggctagggacgacataaaccctcttgtctctcacaacttgtgttgtggcacctttcaggatcaggaatggattgttttctaagccttggactaattcactcacttcccatctgcttccctcccaccccaccaggacgtcagtggctggggcatctatcttgagctggagtcacccagcctggccaagaactggaaaagtctctttggggatttggacccatttctgaaaagctcatgaaaaccactttgccttggtaagaggcagccttcaggtgcaagctggagagaatggccacttatgaattcaataggactgacctttctcccccactgggtttctgtgcctggtgggggggcattcggagacattggtttcccattcactccgacaggactcctgcccccagccggagccctccatatccatttaacccaaatccccaactccagggatgactacaggttgggggagccccgagagcaagggaggtaagtgatgcgatcatgccccattcctgttacctcattttttttttttttttgagacagggtctcgctctgttgcccaggttggagtgcagcagcacaagcacgactcactgcagcctcaacttcctgggtcccagtgatcctcccgcctcagccttttgagtagctggggccacagatgtgcatcatcatgcctggcaaattttgtttatgttttgtagagatgggtctttctatgttgcccaggctgatcttgaactcctggcctccagcagtccttctgcctctgcctcccaaagtgctgggattacaggcatgagactccacagccggccgtcacttatgttatgcttagcatcccacagcatttgtaagttcttcctgacttctaacccagtctcctcccatattccaagccctgtattttgggaagcagagggatgtgatattaaaggagagtgaaaggagagtaaggattagacccagctgcaggatgaggtgcttttgggaaacagtccagcagcactagttgaagtttttaacgtttcccatggggctgcgtagtgaggcccatcacccagcaaggcttctgtctctagaccaggtaccctgatgtttggcactgactataaaagcatatcaaagctggagaaaagccttggggggtcacttccctcctccgttttgcaggtgaggaaactgatgtccagaaagaagcaggcatcagtggagacactcctagccctgctgccctctcctcactgcacacacttccaggttcagacaaaccggaaaggaaacccaccatgcaggactgtccatgtgatggctcttcccgtggctccatttctaagcgcctccgaggacctcatcgtggcccaggaccgcaagccaaggccaccccagtgtccttaccatcctgggaatgggaggagtcaggcccagccttgtcctgtctgcccccctggaagccttccctgagcactggcctcttatttacccgtctttgtctctggcttgttggtatctgtcccttgtctgattagggaacgcctgaggtcaggatctttgcctccccaatcagattgtcaggcaggagtgggggtagtgcagatgctgggtcatttctacatgtgagaccaaatagtggtcctgtttaagttgatccccttgaaagaaaattctggaaaagctcctcagatgcacagatacacagaatcagaccttgggcaaagtgtgtagttgtgcttttgaagctgtgcaaccttggacaaactacttgacttctctgtgcctcagtttccttatttgtgaaatgaggggtagtcatgataccttccccatgaggttgatgggaggattgagttaatatttataaagcatttcagacagtgccagagatataccgtgtgttaaataagtatttcttacacacacacacacacacacagacacacacacacacacacacacacacacacacacttcggaggtctgccaggccagggctcatagccttgaatctacccatggtagagagtcagacaacttgccttgcagactgcctgctctcccagcagccatgcaggggatcttctgcctctgcactgccgattatcccctgccctcgtcagagcctctccccaaaagtacctccaaggccacaattacccaggtctctgcttcagtgctgagtgtctgttcctctccaccatcacctgccacagtgcacacggacagctccatcaggagaagcagggcgaggcaaggcagcatggtgagcctgcactgtcctggaatctctgggagcccctctcagcttgaagatgcctcctgcaggctttggtttgctctttggctccttgagtgtagataggggaaactccccctgttttctggtccttccagctgttcctgattccttccttcagcttaactgatccccaggccagtttctgtgactcccctccctccctggctggacaggccaatgatattaggagctgctcaggaggagggatcagacctcttccactgctgccccctaacatttgatcccagggcttaacactctgatgcaacacctgcctcacctttggctgtttccctggtggcaggtgcacagtggggcagtgtgtgggacctggagcttgcagcttccaggctggaaaacctgaagggaccttctcatcttagaaataagggagggggccatatgccttctccctacctggtgctctgctcccctgtacagagaggcctctccctggaaattagcagtatcccctttctgtctcctcttcctgtctttgagccccctcctctccagcattctcctccatcaatagtccctgtgtgtgcaaaagaacacgtcttcctttaagagaaataacacattgcttaaagaaatgaggctcctcacgagtgggaattgggatttgccagaaaaatggctgcaggtttcaagcgtcattggctctaagtgatctttcccctgttgtcaaagtgatgtttctaagtccctaaactgacttgtctctcctgcttacaacctttcagtgtcttcccactgcccttgagtgaattcaagctccctagtgtggcgttcatggtgtttcatttagttcttccctctcgcctatccacccagatccattcatccatctatccactcatcggtctagaacaagggctctgtggtcacagaggcctggattccaaatagttgtgtgactttaggcacattacttaactcttctcgagaatccttgtctgtaaaacaggattaataatagcacttgttaccaaagtttgaggatgaaatgagagaatgccctggagcacttagcataaagcgtgatggtcaatatttaccacctgctgactttttttttttttttttttttttttgagacggagtctggctctgttgcccaggctggagtgcagtggcgtgatctcagctcactgcagcctctgcctcctgggttcaagcaatcctcctgcctcagcccctgagtagttgggattacaggcgcccaccaccacacctggttaatttctgtattttagtagagacagggtttcatcatgttggtcaggctggtcttcaactgccaacctcaggtgatctacctgcctcggcctcccaaagtgctgggattacaggcatgagccaccgcacctggcttgaccattattactgttactgttatcggcattgggtgaggcagtgggtggtagaagatgagtaagacattcatcctgtagcatatcacagttcaggcacagagacctctggttggcagataagctacgtttggtttgacatgtgccagcgtagcggtgggagcaagggaaaggcacgtgcgccttcccagtccacccctacccctgttccaggacaggctgttgcctctgctggacctccctttccgcctggtgaattcccattcattcttaaagatccagcttaatactcgcctcttccatagaattcttctgtctctattcctgtctctagcaagaagtaattggctccttttgccaacatctgccacttggatctctatggcttcccacgggcctctatgtgaagttgtgcaggttgtgtcctgcacaaggctggctgcagagggggccagtggaggtgaaacgcatccccagctctgctcactgatctgcgcagcctagctcggggtgttcacccctggaagaagaagcttggctccagttctcccaaaagggacagctgggctgagggcatctctgctagtcagccatgtggttgttgactttgccatgagctctctgagagtagggctgtgacagatgtgtgcttggcatacagtaggtccttaagaaacctgcactcaccctgaatccaggccagccaagtcagagatgattaagggtaagtatggagtgtttgagggaggactaccccctccccccacccaatttcgggaatctttttggtgcgttctaaactggaaggcttcagaatccccaaatttgctaaaatgcagcttccccagcttaacctaattcccaggcagccagtcctggcttgtgggttgctcccaactctgcagggaggcagtcccccagcctcccactgagctcccccaagcgcaggacacctaaagcctcacactccatttggggttttccattgtcattaacaggttcttccttagaggaaacaaaatgttgcgttcatcctcttggtttcacaggtgtggaaactgaggcaggccgggcttgctgtaggatacactgagaattcattggccgactggcttggaccccccagccagctctttcccaccttccagtggggtcttacccacagggtttcaggcagaatcacagcctgggcctctagacaggggagatggccttccattctcctgatgcagatggggtgaccttagtctctactgagtgtctgagccttagttttctccatctgcaaattgacgctgaccctcctagtatgtagtaaagatttcatgaattcctgccggtaaagcgttcagcagagtccctgacacacagcacgcgctcagttaaccctaacttaattgttgtgatgatgaggaggatgatgattttattccttcgaaggagcgctggtctcctggccccctctcagtctcccgacctcgccagcgccagagccatcctgcatggtcccgacctcgtcagcgccagagccgtcctgcatgaggcaggatgtggtgggcgcacagcagggacgaggcggggggcacggggcagaaaggagagggcgacgggaagaaggcagagaaaacccaaaaggtccggaaggctgggagggaggcagggcacaggctggaaaccgcggctatttgcagcgtcgccctcgggctgcggtcaggctggcgctggcagtcctggcggccgagcccgccgcccctcccggtgccctcggccacccgggcacggccctggccggtgcgtccagctccgcccggtccccgcggccccggcggcgggtgggctgcggcgctgccgccagaggagggacccggccgatccggggtgggctggggcagggccgtgcgcaagtcggggtgcgacccccggcggggtatgtcgcggcggtggcgcccccgcgggagccgggccgggggcgggtcgcggccgcggcgaggctcccagggcgccgggtgggcgcaggattgctaaacgctgcggtttggctaagattgcggagccgagaagagaaagggcgcaggagggagggatttaaaacaaaactaaaaggaggggggaagcagagggaaacgtgagatgagggcggatgagggcaggaagctgacatttcctgaacgcctcctccagccaaagtcggtgcgtgatgggcccattttacaggccggcgctgggagaaggcctccagccattaaggggcagaggtgggattcgaacctagacctatctgctgctcgcgggctctttcatcttgactgaggagcgcgaacccgagggagtggggcgtggggctgggaggcgaggcgaaagggagagggctcggtggggggtcatgactgcctggtggggaccctggggacaggggcagccgcaggttgacgatctgggttccttcaccgaccacgcacgaagggtggggggaggtctgcttcagtctttcccgcgcccctccagcgcccccacgtggaaacttctgaccacctcgtttcccctcccagagcgccggcgtggcgagatccaggctgggctggagctgggtcctggacttggaaaggcctgtccctggatagaggaacaggagataaagcaggggcagggctgccacgggcagggggcctgggtgtcctcgggcacgtagtgcggcccttctagtggcggggagggtggtgggtaaaggtagccaggagtgcttgactgggactttgcaccctgcgcttggccctctcccgctgtgatggtttaagacttcggaaaaaacaactcttgccccaagtctttgaggttcctttcatgcattcattcactgattctggatttactgaacacctttaaatgagagttgcatgcgaacccagttgaaagaaacagagggctgggcacagtggctcactgtctgtaatcccagctgtggtgggaggatcacttgaacctgggaggtggaggttgcagtgaacagaaattgtgccactgcactctagcctgggtgacagagtgagaccccatttcgaaagaaagagagagaaagagagagagaggaaggaagggagggagggagggagaaagaaaaaagaaacaggcatcacaattttaacacggggatgaggtggggcacacggggaagaaaggagagggtgacgggaagaaggcagagaaaactccaaaggtctggaaggctgggagggaggcagggcacgggctggaaaccgcagctatttccgcagtgtggaaagtgccatggcagggcacttgggggaaaaggaggaacccaggactccctttacctcattgataatgcgggtgtgctcagacacttgtcctagagagaacacttagggtttggaaaagcggatctctaggtccacagtgtagatggaacaaacagagcccttgccctctgtgcccagaggttgtgtgggcagatgcctttgcccatattcgtggcaggcggtttggcccaagcctgctttggtcttggcatttctagcccctcagttatgccccgtgtgtctctgaaagggcctgaaggtattgcccagtttcagaaagaaattctcaccactagcggatcagagttctgttttgttgttgttgttttgagtcttgctctgttgcccaaactggagtgcagtggtgcgatcttggctcactgcaacctctgcctcccaggttcaagcaattctcctgccttggcttcctgagtagctgggaaaacaggcgtgagccaccaagcccgccaatttttttgtgtttttaatagagacaggtttcaccatgtcggccaggctggtctggaactcctgaccccaagtgatctgcccgccttggcctcccaaagtgctgggattacaggcgtgaaccaccgtgcccggcctatttcttagacaaggttgagcatacaaggaccttaaaggtagatttcagaagcagagggagccaggctgagggaggctggtgaagcccctctgttggggcatgtggggtcttctcctgaccctggcctcaaatgtggccctgaagaagtctccctccagagtgcgtattcctcccggaagcctgtgtgctatcaagtcaccagcgtctgaccccattagtgagagaagagaagcttatgattaacatcaaccttttcttcctggatcttggttagcaagtgcgagagaaaagtgaacagctaattgcaaatgtaattataatgcactgtcctctgtctaccacgtggagcctccagaccccagtgtctgcagaacggtttgtttctcttatcagggaggactctggagccagccacatggagacagcacccacgggttggggacttggctggcggggacttggtatgaggggcgcacggagctgcccttttgggattgaccctccatcctgctctctctggctggaccagaacccctgagctgatggagctgggggcagcagctgtgggggatgagaggctgcccagtgtgtctgtggtctgggagagcaggggttagtcttggggtggggagggaagaaccccagtccctttctggcctcatgtgtgagcactcaatcagggagcagagatggctagagaaggcaagtaaatgattctctaagtccttagggttgacttcccaggaagcgtccaggtctggagttgggaccctaggctctgcggtcttggctgggctggctccccattcctgcagttctgcccctgcagatggaaacagctggaaagttttagggcacagttgccctgtgcctcgcactagatgtggggcctttaaagaacttccctttaggggctgtacgatcttcatgtcttggtactttccctccacttgtctgcagactcctcttctccctccactatttccttgttttgccttcagctctgagtgacactaggcatgacctttcttctctttgagactcatctgtaaaatggaaagtttgttgaataggaagatctgagattctaagtgaggtggattggagatatcatttggagtaagtatgtatctcggacgggcagagagggagagagggagggggcagaggagaggaatagtctgagtgccacctttatggttaagtaaaccatcatagacagggatgccctatacagttgtgcaggttgagcactgcccaaaggtgcctggctgaggcagatcatggaggctgaaattcagccctgctcatttcaccaaaccaaccgcttgggcctcacctgcaccattcaaggaagggctgccttttcccgtttcacacagatgtgccttatgggctagcacaggccctgataaagccagactggggggacagatgatgaaatattagagcagaaatccaaaggggatgatggaacttatcttgtccccaaataggcatcctttgacccctaattaaaatgcctgtgccaagcatggggaaataagaacaagacatgtcacagccccagaaagcttacacagggcagggggagagaggcatgtgactggagacaaagcacaatagtaccattgctttaagcatggcaaccatatttatttgagtgtcaaatcaggacatagtgtacattgtatgagcacacatacagggctcacaaaaaggggtttttgactttaggagttttctggtcaacctgagcatgagtctggaggagttatagcagagttttgtacagagcatggatgcatcgaggggaaattttgctgggagagtcaggaaaagttctcagaggagatattgaatggtggatgccagtttgccgagtgatgatagcgaagggtgtctaggcagcgggaacagcacaaaaaggtactgaggcttgaaagaagacagttctcactgggtttaagttcaatgagagcctgtacaggctgtctgggaaatggggagcctcgaatgcaatgctggggagcttggattttatccaggcggataaaatccctagggatttttatttctcttaagggctcttaaactctcctctcctcaaagaggtgatgaggaggagggaatggagatggggaggggctggaggcagggaagccttttaggaggaagtcattgtaatagtccagggaagaaatgggtcggcctcgaaggcagacctggggcttgggagaagagggctggggccagtgacattgcagaaggcatcaggcaccagtagatctgagacctggagggaaggaggattgggaggaggaagaggaaggagagcaggctcggggtgggggcgggtgggctgtgagtgtccatttggacaatttcatgggagatgctggagatgctggagctccaggggcaaagccatggagctttaaggaactcagtgtttggggctggtgaagctagaggagaccaggaaaaccctgcaaaatcaacaataacaggctgacatggagacctaggtaggctatggcaagggggtgggatgggagagaccgagaaggagaattagaagggcaggtgcatcaggagagagaagaggtgtggacaccagggagagtgacacttacaaaggtacagacgcatatgtacagacatgtacatgttcacacctgataagggcaggaagcatacacttctgagatgagctgaagtaacatcatccatttgatatgctgtattatttgaatattttacagtgaaaatatgtgcatgtattacttgcagcattaaaaagcaattgaaggcccagtgtggtggctcatacctgtaatcccagcactttgggaggccaaggcagaaggattgcctgagtccaggagtttaagaccagcctgggcacaaatcaagaccctatctctacgaaaaatgaaaaataaaaaataaaaaataaaaaattagctaggtgtggtgatgtgtgcctgtaattccagccactcagaggctaaggtgggaggattgtttgagcccaggaggtcaaggctgcagtgagcagtggttgtgccactgtacttcagtctgggtgacaaagcaagaccttgtctccaaacaaacaaacgaaaacaacaaaccacaattgaaaacagataaaaagtaatcaaaatgtccattaacctgagaatggattaagcacttatggtagtggactattacacagcagtgaaaatagatgagttagagtgcatgtatcaacatataaactcataaaatgttgaccgggtgcagtggctcatgcctgtaatcccagcactgtgggaggctgaggcgggcggatcacgagatcaggagatcgagaccatcctggctaacacggcgaaaccccgtctctactaaaaatacaaaaaatcagctgggcgtggtggcactcgcctgtagtctcagctactcgggaggctgaggtaggagaatcacttgaacctgggaggcggaggttgcagtgagccgagatggcgccactgcactccagcctgggtgacagagcaagactccatctcaaaacaaacaaacaaacaaacaaaaaaacaactcataaaatgttgagcaaaagcagcaaagtgcagcagaatacctataaggccagcccatctaggtagaatttacaaacatgaaagacacatctccatgttatgaagggatccatgcacatgtagtgaaagtgtgaaatattcatgggaataactgatgggtttaggagggagctcacccatggggagggaaggagggagggggatggggtcaggagaggacacaggtggttttaattcttcttggaaatgagttattccttaagctgggtagtgagcattcggttttgccatactgttatatgtgctttatgtaattcacccattttgaaaaaaaaaagactagaagagaaatatgaaaagcccatggggagaggagttttaagaaccagggcctggccaacatggcaaaaccccgtctctaataaaatacaaaacttagtcagtcttggtggcgcacacctgtagtcccagctactcgggaggctgagacaggagaatcacttgaacccgggaggcagaggttgcagtgagccgagatcgcacctttgcactccagctggggcaacagaaagagactgtctcgaaaaagaacaaaacaaaaccatggaaggtggctgggcatggtggcggtggctgggcatggtggcagtggctcgcacctgtaatcccagcacttggtaggctgaggtgggtggattgcttgagcctaagagtttgagaccagcctgggcaacatggtgaaaccttgtctctataaaaaatttaaaaattaggccaggcacagtggctcacacctgtaatcccagcacttcgggaggccgaggcaggcggatcacctgaggtcaggagttcgagaccagcctggccaacatggagaaaccccgtctgtactaaaaataccaaaaattagctgggcatagtggcgggcgcctgtaatcccagctactcaggaggctaagacaagagaatcgcttgaacctgggaggcggaggtttcagtgaaccgagattgctctattgcactctagcctgggcaacaaaagcgaaactctgtgtcaaaaaaaaaaaaaaaaaaaaaatttaaaaatagctggacatggtggcatgtgttaggaggctgatgtgggaggatcacttgagcctgggaggtggaggttgcaatgagcagagattgtgccattgcactgcagcctgggcgactgagtgagaccctgtctaaaacaaacaaacaaacaaacaaacaaaaacagggaagagtcaccagtgtcaaatgcagcagaaggtcccacagggaagcaggggctggaggcagagacattggggtatcccggggcaggagcatgcccaccagtgtattgggcctgctttcagttttcctgtgaagaatcctcctggccagagggccctaaaatcccattatcagccagtggtcccctggggggtttcccctgtggcttagagcccctgcagcctctgggacttgcctctgggactcagaggcagcgccttggttctttgatgttgttaatgatggtagagtgaagctgtcctcctctctcaccaaagagtaaatggagtcatcaccttgagactcattggaagacctgagggggtgatagtagtgccaccagccagtgctcccggaggtgtaggttggccctgagacagggggatgaccaagctgacttcaggaagagttggagagtctccagtggagattctccggcgcccaggggcaggtgggcgaggacgatgttgaggcttgaagatttggggaggccaaagccaaaccctggtgcccaggcatggagagtgagtgctgcccaggcttggcagacagcaggctgaaagatgcagtgccaaactggggagaggggctgccagggttgaagatcagaggagcggatgggggagccggggcactgtcagggcttgaagcaggaggccgccgggggtggcatgttggggaatcagtgaagccaggggaggctgggaggaagcaggcattgccaaagcagcagtgggaaggagtcagtgccagctgaaggccgggggtggggagctggggcagcaggagggagccctagcactaattccctccccagacttccttcggttttgcaacaaaaacagatgcccctgttggtgagttgtaaacagagttttagggttcagagggttctttgtggggtcttttccaatcctgtttttgcacagatggagacagcaaatgcccagagttggggaggttggcctatgcaaggccacccggtgagtctagtgacaggacctggattgaacctgcctgcatgtccaggtctctgccaatgtctgtggactgtagggtggggacctggggggaagggggttcccagagtgaagggctccagtcctgaccacagggagcagcagtcctactggggagggagacgagacgaggctcaaacacatctaaacccagccatggatggaagttctgtgtgcgctgtcggggaaatattctggagcaacagtggactggccctccgggagccagtgtctttgagggaggtgtgccacagaagctgtagcttgggcagtgctccaaataaaggggaggcttttaaatccattaagagtttattttcagtggaacccaaatatcccagcatactagaaaagatgtgaaagacaaaaatccatcatgaaggtggaattattattattattgttattatttttgagacagagtgttgctcagttgcccaggctggagtgcagtggcagtatcttggctcactgcaacctccgcctcccgggttcaagccattctcctgccccagcctcccaagtagctgggattacaggcatgcaccaccacacctggctaatttttgtatttttagtagagatggggtttcaccatgctggccaggctggtcttgaactcctgacctcaggtgatctgcccccctcagccttccacaaagtgctgagattataggcgtgagccaccacgcctggccaaggtggaattattgttgggtgtctaaagctaaccttggttcctcatgctgtctgaagggagccagggtgtgggcctccaatcagcagataatcctgaccccataggtctgctgggggacagagttgagggccttctcttagctttcgtcaactgcagccccaggaatgtgcaccgcaggccaagggcagaggtcactggggaagtgtcccggagagcatcagttcgccacctcgttagacagtgccgcagcctgaggtcccgggagaagtaacagcctcaatgtttgatttatttctaggatgtttgcggcctcgcatgtgactagaggagtgtttgccattctgggagggcgttagcttgaactagggtggtgccgccagagggcagtgaatggccctgggataggtgctcaggagagtgggcctggctgggcagagatggaactgtggggaggggccgatggtggcctgaaccctgaactgtctccaccctgtgtttggcctggggatgctgaatgatttggaagggtggcccaccatcaggggaagggcggggtgtccaaaagttcctgggggctgcaggatgggacccatttagcctccgcagtcatctgacccccatgactcaggcctggccctgcccttgaagggcactgggccagtctgagctcatcaccactgcccagagcagaagtggtaaacaagttcaccctcggcctcccacccctgagaggaagcagagggtgaggtgggggccctcaggcagctcagcccaagccttctacataatgcaggtgcatgtcacgggtgtcccaggggctggtggggtgtgtgctgggctcctgcatgcgggcgacacgcacaggtacatgcttcccttcactcacactcatgggggtgcccatggccaacctttccaggggccaacttggccaggttcatggggaccattttaccccctccgtgatgtccagggccaacagcccaatgctcatgaggctgggcctgaggactgggggtccccatggagtaacccctggtttgattccctggtcgtcaggcctcacggctcagacccatgtgctatggggtcccttatggcttctgggaccctagagatgccacagaaaaatattcttggcctacctaggtccgtggtaacatctgagaaggtccgatcttcttaagcatcttgcttctcctgttatcttctgccctcccttcctccctcttgcctttctctgtcttcctccttttctttttcatcccctgtcctgatctttctccatcgcttttctcctctcagcccaggtaactgttattgctacttgtagccaccagatggcaccagcgcatcatgtgtccccggtccttgctgggggtcccccccccacccgccaagatgattaacctttcacaacacccacaccctgtccaacgccttcccaggactttacacccagaggaaaacatgcagcaaaataccagcagggccagggtaggggcaggagcatccagctccctggggagagcctctacctgccattcccttcagggtgtccgcccacgcccaccgagggtgtgatagcctttactcccggcaagccagtgaggtcctagtgatcatctccagagaacagaattcagagaagtgaagccacttgctgaaggcaggacagcacgtgtgtagcggaagggaactcaaacccaagcttcgcaggttccaaaaccctgggcttcctgggcaagtgaggcaggaaggggctggggcaaggatctccagagccagagcgctctctcccacaccaagtccctgttcctacttccgtccctctcatgtctccttggtccgcttctttcagacctgactcagaaccctctgcccagggaggtgctcgtgatgacctcagcccttgggtcctcttagaatttaggcatctgggccgggcgcggtggctcatgcctgtaatcccagcactttgggaggccgaggtgggtggatcacctgaggttgggagttcgagaccagcctgaccaacatggagaaaccccatctctactaaaaatacaaaatcagccaggcatggtggcgcacgcctgtaatcccagctactcgggaggctaaggcaggagagtcgcttgaacccaggaggcggaggttgcagtgagccgagatcgcgccattgcactccagcctgggcaacagaatgaaactccgtctcaaaaaaaaaaaaaaaaaaaaaaaaaaagaatttaggcatctgtacatgaaccagtttctttttttccctttttttgcccctttgttctgtgtatcctggcactctttctcttctaatgaggttgaaatgtagaagaggtggtccctgccctctgggagcccccaggctgatttgaaaacataactctgccccaggggccaatcgaatgggggagacagaggtgcggccatctgggagcccctgctagtgttgagcctgagctaggtgaggatattcaaggcaggcttcctggaggagccagggaaggggtgggccaggactaggggaggtaggctgagtgagggtagtgccctctgtgacagccatggggctaagagttgtccaatgatcttcatgtgtggggagcagaggtggggctgtcacagccctgtattcaggggaggggaccgcgttggccctaacttgggctaagctcccctctggcccatcccgccgccccacccctcactccctgtcccgctgggaggctggctgtgggctggggccaggagggccagggtggggtcccttcctcaaggctggagcaggatcctcagcaggctgtggcagtgcccaggagccagagaggagccgccgccccccacccccttgggcccctctgtaattagggctatttttaggcccctcttccttcctatttcaggcctctggactgggccggagagtgggctgtcctggggccgcgggctggagccgctaaactgggccgcggcgtgggagctgcagccacagcagagaccacagcccgggcggagtcctggtgggggaggggatcccaggacgtggccaggcctggggcagggctgggagtgggggcgtgtcttggctcatcagacccctccctgggccccttatggatcgattccaccctctgcccatccctctgccagtgcccccagccctactgatgtgaagcagttagtccttggcctgcaactctgtgtgtatccaaagattgtgcaatgccagcactttcaggcagtgttggccctaggagcgatgcccagaatgttcataataatgaccagcatttattgagtgcttactttgtgccagttacagttccggcgctttacctgtattaactcactgcttacaacagcacgttgagatcagtgctattttatctctataaatgtctcagatagaaagattgagactcaaaaatagttcatttgacagctgggcacagtggctcatgcctgtaatcccggcactttgggaggctgaagcaggaggattgcttaagcccaagagttcgaggctgcagtaaactatgattgcaggactgcactctggcctgcgcaacagaatgagaccccatctctttttttttgacttggaatcttgctctgtcacctgtcgcccaggctggagtgcagtggtgcgatctcggctcactgcaatctctgcctcctgggttcaagcgattctcctgcctcagcctcccaagtagctgggattacaggtacgtgccaccacgcctgactaatttttgtatttttagtagagacggggtttcaccatgttagccaggctggtctcaaactcccgacctcgtgatccacctgcttcggcctcccaaagtgctaggagtacaggcgtgagccatcacacccagctgagaccccatgtctttaaaaaagaaaataaaagaaatagttgatgtatcctgtgtcaggcttattcttgtctttgttaggtattggaggaaggagatgctgagagacatgcgtttcttcccggatattttcaggctccaatctgagggtccagtactatcaggcatggctcccaggcagctgcctgctgacgctctgtctgtccatactgcgatggtccgtgacctgtcctgcaggcggaagggtgggtctttcccagctggttccagttaggcacaagaaagcgggcgaggggtatatttagccctggtttctggaggagccagaggtctttcatccttggaggcgccggccgcagtgggactcagcttgccaacgctgggctcctgggctgcaggcttcagggcagagagtggggtcagggagaagaaggggcaaatgtgatcctacccatttcaggggccagagttgagggccaagtggtgatgccaggcagggcaagcaaggcttgactgccatgctcagaatatgtccctgtaagctggagggctcctgtaggtagtggagggcaggcctggtggtgggggagagggataacccgctgcctacccctccagcccagacccagcctaggcctagtatgtccacagcgtcaggtttattctctggtgcttagctctggcctgggaatctgggggcctgtccttaggagaagtgagcaggggcagagttcaaggagtagggagggggtaccctagactgcctgccatgtttgggtgttcatatttggagaaggtgggagggttgggggggcagatatacacgtgcaggagagaaagaggcaggcatagagcagcaacaacatgccacgtggtgtgttggggtctacaggaggggcgcacatgtttgattcagcactatgtgctggggctatgtagtctgaacatggtgtgatggggctggtgggctgggaccccatgaggtatggaggattgtgttgctgggatctggtggtgtgtgggtgtgagatgacccatgggtgaccgtggcatgctccactgtgggtgactaggacattgtgtggctccatcatgctgtccatgggggcagcctgtgagtatgatcggagatgagggactagagtttaaactgtacgactgtgatcttgtggggtgtgtaattatccccatggatgttggtctctgtgtgtgagactgtgagtaaacacatgtgtggatggagagtttggggctctgactctgtgtgtgcgtgtgtgtgtgcgcacatacccacgtgtgattgtgattctgagtgtagctgggtgtgtgaaacgtgcacagacctatcagccactgcaaacgaggcctgctccctgctgaggttcatggcctcttgcccttccggggacccccaccccaaagccacaggccctctgggcctgagggagggaaccctacaagttgtaagcgcctgtctctctcctaatcctttcacccccactccctccgacccgtccccacagactgcaggcttctacctgccccaggcgggaggcaggggagagaaagaggagcctgcccgcctgcccgccgcccctctgtcgtctccacgctcagacaaagagctcaccctggtctctgtgggcgtctgggagacgctggggggattagctgcccgcaccgccctctccccaccttgtgccagcccacccggctggcaccaacacctcaagcccaggggcggtgccctcaccgcagcctctctagcctgggagagtgtgtgtgtgtgtgtgtgtgtgtgtgtgtgtgtgtgtgtgtgtgtcttgctcagcaggggtatgtgtggaagcagaggtacaggcccctgagaagcgggtcttgggacaccaccttccattgctggcctgggcaggctctcaccttggtttctgcttctctgtcactccagcctgtgcttggaaggcctacatctttgttgtcacccctgtgtctttgaatccctcattccctgccctctcacccctcccccactgttgactgcagctcagaccttccattctttcccctgcattcctgggggagggcatgaccaggccagtgagctctgagagcaggagggagagaaggcggcaggcttcctccagtgagagctaggcataccccctcaaggctaagctgtccatttcaccacgggctcaggagggataaggctggatggaggagacttggggatgacactgggagtggctattacttgtgtttcaggagagtcccctgtggcttcccctgcatcagcagagcaactagtatatggttagagtaactgtctcatgacttcaaggcccaaagtttggcccttttcttcacattgtgcaaaaccagaaatggttttcaaaattctttcatgtttattttcattggattttcacaacagaaagggtgagtattgctacttttctcatttcagaggtatttaaaccaaggctcagagaagttaagggatttatccaaactcacacaactggtgagcaagaaagcggagagagaacccagggtcttgctctgtaagtgtcaagagagaccctttggatccttcataattcctgtgaccagacctctgcctccccagtacctgtcccctccacccctgaagaatctgctgtctcgggaaactccagaatggagctgggccagtgggagctggatgagatgacctggctcctccctgagtcacacccaatccttgagcaatcaggtcccaattccacagacagttcttatggtccatcccatgcttttgagagagttatggaaatcctcctctttctgctatgtgggttggggtctactttgttcttaaagagccctccatattcttttttatccaaaagttattacatagtttaggcccctcctgctgcagaaaaggactgtctcctttggtttggtcttcagtggaggtggtgaggcactggccccatcccttctatgggagtgtgcttccaagaaggatgctgggatttcccaatgactgggggaggccatgaaggttagggagctggctcagtgtcttgaaataagagatgacctataaatgtagaggaacacacagtggtgagtgggtggataaatatatagaagtgggtgatgtccaggtgagtggatggaggatgcatgtgtgagttagtgggtaagtggatggatggatgagtgggcaggtggggtttgtggatggaggagcggctgatgtttggatggatttgtgggtgtttaggtaaatggatataagggtgaatggttgaatggatagattattaggtgggtgcatgatggatggctggatggatggatggatggttgaatggatagatgggtagaagaaagaaaggaagaataggatggatgaatggatagatggatggaaggaaggaaggatgaataggtgatggaaggatgcataggcgaatgggatagtgggtggataggcatgagagtagattcgtggcagagatttgggagcctggaggagtctttaaaagacagactatacatagtgaatgagtttttcacatctaccttagttttggtcagctctcaatcatctagactgatggagagaaaccatgctatggaaaagtctagaaggtgttggcctatttcttggtctcttctgcccttcggaaaaatcttctctcgtgggactctatggcctggtttcccatgattataggagccctcatgcattgagaacatgctggatgccaggtgccttacatacatcgtcacatttaattctcacaacatcccttcaaggtagggagtacttctcccattttacaaatgaggaaactgaggctcagaaaggtgaaaggatatgctcagtattacccaggcaggatgttggaaaatcaggattcctattcaagttggcctgacttctctgcctcatgccacccctaatttctgaacacccccccctccctgcagtcccaggcccagctggagagaatgggtccaaggagcatcaactggagggacacatcagagaggtgaaggagagggcttcagaggatgcaaaggctagaggaccagagatgggcccacatggggatcctcaaggcttccagggctggtgcaggggccagtcagcctctgtctgaaataagaggcagcatgaaggatttgggtgagaccaccagaaggactttctggcctagaggggtatagaactctggaatgggtggaagagggaaggcatagagaaacatcctttggagaaagcatcttctgggagctgcagtgaggctgacttcctgaccagagcaggaggtggctagaggtcatttcaggacctgccctttcagccaagaggctggcatccctgcctggctggaagttccgaacctcaagagctggagtttttccggcccaaggaaaggcaaatcatggggactggtcctaagatgctgaagctggagcagtttggagcccacttcagaacactgaacctggggcagagagaggccaggatgctttttctgggagacagagaggtggtggctgcaggaaccatgagagatgctcgccttgctcagaagtccctgaggtcagcagcctgcccttcgcctggggatgctgcccgtgagcaggtggctctgacctctggccagctgtgggcaggggtggaggaggactggggggctgagactgtgtggtccaggtggcccgagcagagggtggcccctcctgtgtctctcctctccctctggcctcgcctcctggccctttgatgctcctctcaccacagacttcaaacaggctgccctctgctctgcccgccgcccgccctgcctgcctgcgataattagagcctcactccctgcctcttgccctcactctcttcccagctctccagggaagctctgccagctctctaggcgccgatcctccattcttttttcattttctcaccccttctctttttctccatctcttccctctgttcttggttctctgtctctgatcctctgtctagatcagggatctctctctctctctctctctctctctctctctctcctctctctctctctctctctcctctctctctctcttccccctcccttcttccccatttctctatctacctctgtgtattttctcactctgtcatcttttctctgtcttctctcctctatccatctctgtctttccttttatttttcttctctctcccttttcaggagatcttcacccccacacatggttggctgccctcttctgtgcctttaccctcccagaaactgggcctcgggactcccctctgctccctgattgagctgggtcctggtgcaggcaggaagtaagccagcacagggcccctctgcctcctttctggtcagggccctctgggctcctgggcctggaggagggggcagcctcagggccctctcacccctcctttggcatcttttaggccctttgcaggtctggattttctgactcacctggcctcccacccagagtgcccccttcgtggccctgtgggaggcggtaccatggccattctctttcccaggagaagaggggtcttgcctaggagcctctccgtggcctgatggaaataggggagccaagaaccccacaaacctccctccacagagcactggagcttgggctggaccttgagcccctgccagggcccaggcacctctggcagtatctgtcagtcaggagcaggggtcccatggccactgaggagaggcttataccgccccccacccccgggcccaggacttctggtgctgcagatccaggcctcttggagagactagtttaaaggggcaagggccttggagggtggtgagagcccaggctgtgcacagactcccagggctgagagccagatgggtgggagcccccactggcactgcagccccggactggacccttggcatccctgggctgcagtttcccaagggcactgtgatggtaagaaaggcatgacacagccctcagctgcgcatgctgctttccagttcatagccctttcctggtcacgagcctcctgacacccaacacaagcaggaagtctatatcctttgtacagatgaggacactgaggcatcaggcgtgcctcaggtgctcttctctaaggtccctcctggagggggagggcaagctggctgggccgcaggctcagggccccatgggattccaggccccagacagtgggtggcaggcaggacacaggcctctgtccagaacttcactgcccttcaggcgcgggtagttctggccagttctaggtggcaaaaatgggtgctcaccaggtaggtgggagctgaggagtggaggggctgcagcaggaaatccaatatttactgagcatttctggataggccccaggagaagccatgtctgggggctgccgaggggatcaggagctggacaggctgggggaggggccctctgagttggccagacctggggcagagggatctcccagccacccaagggtgtgtgtgtacatgtgtgtgcacgattgtgaggcggtgtgggattgtgtgtacagatgtgaacgtgtatacaccagcacgagtgactgcaggtgtgctgtgtgtgtgcacacgtgtgcatgtgagcgagggtttgggactatgtacatacgtgtgtgtgaaggtgtggttatgtgagtgaacgggaatgagggggaatgaccatgtcagtggctgcgccctgagtgtgcatatgaatgggctggggtctgctggtgagaggatccacgaaaaggtgagagaaggggcgggagtgagcaggcatgagagtgtgtgctcatgagcatgagtgtgtgtgctgatgcatgagcgtgtgtgcacacctggggtttcctcctcatctttaggtcttgtagcattggccaccttcttcctccatcccagcctcccttactccttccctttttccttccctctccccttcctgctcagccaccctgtgaagaccgagttccaggaagcacaatggggatgcccttttctccctttgctggcaagaagggggtcctcagagcccggggtggatggttggttcaggaaggatggtcctggggcttgtagggattgaaggctccagggcacaatggcacctatctctgggagctgggtacagaggaggagttggggaaagtggcctcctccctgctcctctccccgcaccatcccaggtgaaaatgtgcatgagagagagtggttgttaagtgtcagcatctgagacctgagtgtgggactgtgttgctgagggaggcagctccaggcagtgccctgggtgccagctcctgccttccctgccctgtggcctggcaagtccctgcctctctgggccaccatgcctcaccttcgaagtcttctccttctggtcctcacacctggctccctggccctcaccccctctcctacctcaagaactttggcccgttttctcctggctgtgccaacttggcggggcctgcggtctgaggttcttggctggggagaaggcctagaggagtgagggagtttattttgcctttagaaatcagggctttgggctgaggttggcttgctcaccccagacagacttgtctgagcacacctctgctgcagggagggctgggcttgggcactcagcgctgctttctcctgccactgcctgggtgggagggagctgtccgaaggggacacttgctctggggagcccccatccaaggggcgaagcacagccctgacctgggggacccttctgtttgatgagagagacaagacacgctggatacccagagagccggatacacacagtggaataaggacgcaagtcttggccagacagaacccccagagtgtttaaccaagggccgggcagaaagtggccactcaattcctttttttttttttttttttatcatttgtttgagacaaggtcttgctctgtcgcccaggctggagtgcagtggcaagatctcggctcacggcaaccttggcttccctggctcaagcaatcctctcacttcagcctcctaagtagctgggactacaggtacacaccaccatgcccagctaatttttgtattttttgtagagatgaggtttcactatgttacctaggctggtctccaactcttgggctcaagtgatcctcccaccttggcctcccaaagtgctggaattacaggcgtgagccaccttgcctggcctaattctttgaatgaatgaatgaatgaatgaaaagaaaggaaagaaggaaggaagggaagaatgacatcagggccagaggggagggaggagataggtggtgctgagtgagtgaggagcctgggcagcttcctgagggctccaggatgtagggacaatgaagccttttccctgaagctcaggacatttgaggcctctaacatctattttgactagtgttttttttccccaagatggagttttgcttttattgcccaggctggagtgcaatgatgcaatctcggctcactgcaacctccatctcccgagttcaagccattctcctgcctcagcctcccaagtagctgggattacaggcatgtgccaccacgcccggctaattttgtatttttggtagagacagggtttcaccatgttggtcaggctggtctcgaactcttgacctcaggtgatccacccgcctcggcctcccaaagtgctgggattacaggtgtgagccaccatgcccagctttgaccagtatttgaggcctctccaggactctggaaccaaggcctcgtgagattccctgcttagttcactctctctttctgcctccatcttccactcccattctggggagactgccccatcagcagcccagagagcatgtccagggatttccctcctctgtgcccctccttagggagatcactcagcttggaggaggaagcagggtcctcgtcgttcaggggcagggagagatggaccagctgggcccctactctcttcaatgtctggatcacttcccctgtggccccacttcctccctgccaaattctggaaatcacagcctggcctgccacacttgtctcctctctgacaccatcccagcctcttcagtggcagggaggagtgcaaagtgggggtggggaggactacagtgggaagaaccactacgtcatccctgcgttcagccccagacgctgggctaaaaggctgtagtgggcaagatcaggaggatggggcctccaggggtgtcagggacccaccaattcccaggtagcctgcagggcggcagcctcaaaaatgaggctcaaagaaacccagaggtgagtgggtgggtggagagcaggttccagcccacttcctgctctcatcagccctcaccccacaacatagggctgctgtgtctccctgtgcctggggtctgtctccagaactgagagggtgggatgctgaggggggagggtcctgagacctgaggctggttgtcccccatcagctgaggggctcttgggggcaggggatatgtatatgtatccccccatctgactggttcaagaagagggaagtggtaggcatgaccaaattagatggacttcgaattacatcctgatggcagaacctcccctgccccagcccattcccttcttggtaggagatcaaggttctggagggctgtgagtgggctggccctctgccccatgttgaaagctccatccgacacacaccgtcttgtgtagcgattgctctaacagctgcacttaaaatggatggatgcaggcacgtctcagataagagctgcttgagatttcgagtactttacagttgcaccttcacacacctgttcccatttggagtcccctggcagcaatcatgagacaaggcgggggatgggttgtgtttttcctgttttgcaggtgaggaaattgaggaggagctgtacctgtggttcaggaagtgtacaaagggtctggaccccagcctaggctctgggaccccagctctgtctatacttctctgtcttcttatttttcacattcacaaactaatttgattcctggctgggcagtggctcacacctgtaatcccaggactttgggaggctgaggtgggagaattgcttgagtctggcagttggagaccagcctgggcaacatagtgagacgccccccacctccatctccataaaaagttaaaaaattagctaggcatgggggtgcatgcttgtagtcccagccactcaggaggctgaggtggatggattgcttgagccctggaggccaaggctgcagtgagctgtggttgcgccactgcattccagccttggtgacactgagaccctgtctaaaaaaaaaatacaaaaaaataaaaaatacccaatttaatttggttcctttggattcctcgtgggtaggctgtgtctggtcagcccaggggggcagggccagcaaagatggatgggcccatttcaggctgcgtccagatccccttcccagcctaggggctcgggcttcctttgggggaagttctacaaggtagcagccctctctcctggtagccccaaccactgacctgtgggctgcacccgggctcagggggctgataggaggcacagggtctgggtcaggccccagccagggctgcccctctgtggatgggtgggaggtgggcatgggagcctttgatctgttgccatctaaccctgggtacttgagtgtcattgtggcccccatgctagttattggccaggctactccagagcacactcctctctgggtgacagcccccttcccaccatggcccctggcaagagaccccctcccctccacgcccacctaacaacccagacaccccaactcaccacctcagggctcccctctgtcttcctcctgaggtgccagggccctataggcactttacctgggtgaactcaatcagcctgagagtagatatcattatcccccattttagggatgagaagctgaggcccaggaaggtagagtgatttactcaaggtaacactgctaggaagctggcggaggtgggattcaggctgtcaggctctgagaagggcatagtcaaaggggatgctgcagagagagcttggaacttgggaagggctttgaatgcctttcagaggagtgagcctcagtttattttgtaagtgaggagctttcaagcaggacagttacacagtgatagttgagagcaaaactgtctgggtccaagtcttgccctgaacacctagctgtgtgaccttgggcaagttaccaaacctctctgtgcctcatgttctcatctgtaaaaatggaatggaaagagtgtctaactaataggcttgttataaggattaggtgagttcaggagcctaaggcactttggacagagagcagtacatggcacaaacgaagtgccacatgtttgcattagcattggtggctcctaaccggaccccctcccttcttcctttcttactaacttccaaccccatccaccatcctctccttgaggaatgggtgataatgcttggaggaaggaaatgggcctatggccggccaggggcagagacacagtgtgccttgcaagctgcccaagcccttgcccatctcttgttatgactggcacatgcttggtgggcaggaggtatgtgcatttgagtcagataggggaggggaggcaaaaatggaaaagtctgaaaaagtgatctgaaagagtggattgcctgtactttctcctgtgccctcctgatgactggctgtggctcagggtatggccagagggacccatgttaggcatgaaggggatggctgtcacggtaagagggtcttccggtgctgggtgaggaggaggtgggaccagcttccagcaagagggccagaaggagctgggctgagaggaggggaggggctggctatgaagagcaggggcggggtgccaaggaggcaatggaatggtaggggtggatgggtgggagaggattgaaatccacggggtgggggtggggcaggtggaaggcaggcctgcaggcaggagaggcaaggccgactgatggtgggagacaccccgccgggtggtggagatgaaagcagctgcagcggctcctgcgccatgtccctaatccctgcttgctcccctagaggctggggcattctccccagagcggcatgctcctccggcctgccctggcccagctctcaggagtgtgcacttccacccctgatacagccagggatgagctgtgggctggggcagacagagcccacagatcaaagcactggcctcctaggtgagacgggacctcagctgtaggcaaagcgggatgtttcccagttagaattcacagatgagcaatctgatccctcaccttttccctcccttttccctttattccagcactgagtacagagcctgactcacagtaggcacccaataattttttgactttataagcagagctaaggatgcattttctatggttcctgctaatgacctgatgatgcctttgaaaactttgattttttaattttgtatttgtatatatatttttgagctagggtctcgctctgtcacccaggctggagtacagtggtgtgatcacagctcactgtagcctcaacctcctgggctcaggggatcctcccacctcagcctcctgagtagctgggactacaggtgagtgccactatgcccagctaatttcaaattttttttgtagagacagggtcccattatgttgcccaggctggtctcatgccatcctcctgccttggcctcccaaagtgctgggattacaggcatgagccaccacacctggcctgaaacttttaaaacttagttccagctgggtgtggtggcacgtgcctgtgctctcagctactcaggcggctgaggcagggggatcacttgaaccaggagttggaggctgcagtgagctgtgatggcgccactgcactccagcttaggcaacagagcaagaccctctttttttttttttttttttttttaatttaagatggagtcttgctctgtcgcccaagctgcagtgcagtggtgcgttctccgctcactgcaacctctgcctcccaggttcaagcaattctcatggttcagcctctcgagcagctggaattataggcacgcaccaccacgcctggctaatttttgtatttttagtagagatggggtttcatcatgttgcccaggttggtcggaaactcctggtctcaagtgatccgcccaccttggcttcccaaagtgctgggattataggcgtgagccaccgtgcctagccaagaccctaactcttaaacaaacaaacaaacaaacttagctccatctgttaatagctgtgtgacttgggcaagtcccttgggctctctgtgcctctgttttctcatctgtgaaacggtgataagagtagtacttaactcagggggttattgagagaattaccggagttagtatttgtaaagtgcccagagggtgctgggtgcatagaaaccgctctgtttgttaaatggaataagtaaacaaatactgctgaacagtaacatctgtgaaattatggtttggtgcaccagttatattttctcacattaaaatagaacactattaaccattatcaagcctaaaatcatcttccatactgcccatgggaccatccactgctgtctctgtacacaggtaggtccttatgtggttgaatcccctcaccctcttcctgtgggtataactgcagtgtgctcatcagcctcactgtcaccatggctgtgccagagctcctctgctgagagatgtcagggccgtctgcaccgcatgttttctgttgaaaatgacactgctcctaatgacacattgacacagatgggacattagaagtatttaccggggccgggtgaggtggctcatgcctgtaatcccaacactttgggaggctgaggcgggcggatcacctgaggtcaggagttcaagaccagcctggccaacatggtgaaaccccgtctctactaaaaatacaaaacttagccaggcacagtggcaagtgcctgtaatcccagctactagggaggctaaggcaggagaatggcttgaacccaggaggtggaggctgtagtgcgctgagatcccgccactgcactccagcttgggcgacagagtaagaccttttctaaaaaaaaaaaaaagaaggaaggatttgggtcagacctcaggaggaactttccaggtcataggggggtgcatgacattaaatgtgctggatcctggcctagagtggggcagaattagggaattcctctgctccaggccttggaaggccaccctgctgctgtggcactgggcaaggtatgggggcaggtgcagttgacaggagagggaagagggaggctcaagagttagcactagaggctggacgtagcggctcatgcttataatcccagcactttgggaggtcgaggtgagtggatcgcttgagcccaggagtttgagaccagcctgtgcaacattaacgagaccctgattctacaaaaaattagctgggcatggtgacacgtgcctgaaatcctagctactgaggctgaggttggaggatcacttgaacccaggaggcagaggtcgcagtgagccatgacggcaccactgcactccagcctgagcaacagagtgagaccctgtctcaaaaaaaaaaaataaaataaaaaaataaggagttggttgggcgcggtggctcacacctgtaatcccagtactttgggaggctgaggcgggtggatcacctgaggagtttgagaccatcctggccaacatggcaaaaccccatctctgctaaaaaaaaaaaaaaaaaaaaaaattagccaggcgtagtggcgcatgcctgtaatcccagccactggggaggctgaggcagtagaattgcttgaacccgagagacagaggttgcagtgagccgagatagtgccaccacactctagcctgggtgacagagcgagaccatgtctcaaaaaaaaaaaaaaaaaaagttagctctagaaaaaatctgagggtaacatatacacaagagaaatgaaaatgattgaaactcttctcgtttattttcctcttccagcataattcttaggtcacatatacatttgggaaaaaaggcttacaatgggatctgctaaggcctggaaccttcatcgatgactgggagaggggcacagtccagccctgggtgagctgtacctgtcgtcttaatggaaacctacaggtcactctgttaaccctgcaggagggcccagaggaggtcatcccaggcaggcccccatctccagattgctccattgcttcaccaggagactgtctctggagtcaggctccctagacttgaatcctggcgtctccactggcttatccagtggtcttgaacaagcggctgcctcagtttgctcatctgtaaaacaagaataataattacagtgtctatctcattgggggaaggaatgaggtaattccgggaaagcccttaacgcagtacttggcacataactggtgttcgggggcgctggtgattcccctgaaactcctttcaaatggtcattttcacagttctctgggaaattctctctgcagtttgccctccagtcctcctgtgatcatgacaatgtcatctttctagcttatgtggggaatcagggcagtgggcatgttggtcctttctggcctcagtttctcctttcttaaatgccgcctcctcacttctgcctccccctcccttcctctctcccacccacccaccaagcctgcatggtgagataatgtctaagagatagttggagttacttggaggaagaggccagacagtgagtgaccagaggtgattatctggcgtgactaaagcagtggtttccctcccccaaggctgggcagggggaggggtatatctgaggtcgctggccctccacgagtgacttcccaagaagttctggacctggggaatcctaacctggggcgagggtgaggggagtggatgagactagaaactctttgttccaggtggattttcacagaacaaaaaaacaaaacaatgcatcccatttgggaggggcttggagggaggggactggccaaaatggctccccagcatctcggttcttttctccctttgtttttctttttgttgttgttgttgttgtttgagatggagcgtagctctgttgcccaggctggagtgcagtggcaccatctcggcgcactgcaacctccacctcccgggttcaagcgactctcctgcctcagcctcctgagtagctgggattacagacgtgcgccaccacgcccagctaatttttgtatttttagtacagacagggtttcaccatgttggccaggctggtctcgaactcctgacctcaagcgatccgctcgcctcggcctcccaaagtgttggaattacaggcgtgagccatcgcgcccggctcttttctccctttgaaccgccgtcctgtctccagccctcagcctgtctcctctacggagaccgctgcccttgccccttaaccttctccctgccacccctcagccgggacctagccctctcctggcacctccccccatcctgcccccgtcctggggtccccggctatggcagcccaggcctagacaccactttgagacgggagctccctgccgatggaagacccagtctccgcctctcttggcctctcctttgcccaccccgcccccggaatgctgccgaggacccagcccggtaggacagggcagcgggacttgtctccgattctacggcctcctctccgcggagggacccggacggggcagctgcagttcccgcgcaggcctctgggtgctgctcggcagctgcggtcgctcaccgccccaggcggccctatacctgacaggtcctcacccgggccttacggctccctcccgctccccgcaaaggggccaccttcatttactaaaagggaaacagccactcaaagggccgaagtgatcctacttggcgttagtattgctgaatcccatttacacacggggacactggagctccgaggccaagcggattgtctaggtctcacagaaacggggggtggtggggatcctggcaaaaaccttagaaagacccctctaagcccctcccttctatatcagttagatttccagaagaacttcccattcataggtgtgccaggaaaatcttcagcaggtgagaaaagaaaaagcaattcagggacatttggggcagttcagggcaaggtgggtgagcgcccctcattccccttccatgcccagtgtcatggactctgcccctccctgtcctgggcctcttcgaggaagaaaggggaggaggagcctctgtcttggcagcccttgggagggaatggaggaggggagcccgacagaggggctcctctgcagggggccacatcatgaaggagggcttcttcctccccctcccttctcccctccctcatcatctgccccgccttgccccatgcccagcattctcccagcagggtctggggggacagcagcaattttgacggtgggcctaagagtatacaatatggtatcagcatcagcatgtgagagaggctgtgtgtgtgtgtgtgtgtgtgtgtgtgtgtgtgtgtgtgtgtgtcctgtcctagctggagtcctttccaggcttctttactgtagattcccaaaactctgtgaagccccctacccacaacacacactccccagagacagacagctggtctccagtcacccctcctcagcccctgtatgtgcgcgtgcgcatgtgtgtgtgaacgtgtgcacatatatgtgtggggggatgtgcttgaggttggacaggaaccacagagacatggtctcccccactgactgggagcctctgaggtaaagaccaagccccttctctaaatcctgtgcctaggctggagcgggtgctctgtaaacattcagttgggactgatgggagtgtgggtggaagggggttgacctctccttggggcgagaagggtgtccccagagtcatcacttccattcattgcctagaggatagggcaaaagcctccttacctgccctgtcccctcccttctattccttaagttttattcattttaaaaaagtttcatttaagaagttataaaagtgctacatacttgctgtaaaattcaaatatagacaggcgcagtggctcacgcctgtaatcccagcactctgggagactgaggtgggagggagggatcacctgaggtcaggagttccagactagcctgggcaacatggtgaaaccccgtctctatgtctctactaaaaatacaatgaaaattagcatggtggcgggtgcctgtaattccagccactcgggaggacgaggcaggagaatcgcttgaacccaagaagcagagtgagccgagatcatgccattgcactccagcctgggtgacaaaagtgaaacaccatctcaaaaataaatacattaaataaattcaaatatagaagactatagaatacaaagtgttccataagtgcatccccccatcagaggtaattgattggtgtgcttccttccagaccttttaagcattaaaaaaaaacctttttattaataaaatacaaatgggagtttacaaatagtttttcaacttgtttttccatcatgcccatctgtacacacagagtgatctcattttcaggggctgcagagcatctgtcttctgtgtggctgaactctaacttgcttaacttttcttatcaaggggcatctgggcagtctctgatttttcatcgtcatagataactctgggacaaggatgctggtacgagcacctttgtgctcctgtgagtgtgcttctgtaggactgctcctacagaacagctgcgccagcgtgtgtgtgcattaaacctcccgagagctgctgctcagtgggttgtgcatttgccaccacctttagaggagggcgtcctcccttctgtcccggtgatatgatcctgggggcagcgtccacctgttcaggaagccctttctcaagtctgatccaagttgcctcaaatggaatctgagctgttcccttcccaaatcccctgggcagggtcctcttctttggggtggcactcagctggctgggtggtctgggaaaagctgctctcttaaaatcgtgtgtgtgtgtgtgtgtgtgtgtgtgtgtgtgtatgtgtgtgtgtgtgtgtgtgttggagggaagggagcattcttctcctctccttgtgggaagcttcctgcagaaaagagaaaattctggaaaggaccaaggaagctctggaaaattagcaccagtgtttcctgagagttgggggtggtggtctcaggacacttcctgcctcccaggtcttcatgtctggaaagtacatgaagccttctcagctagaaatttctagacatttcaaagcacttctcacatacatacaaaggcttcctttgggaagggaggaggggactgtggcttctgcaatgcctgggggagggtgggtgggagtggaaggtagagcttgggggccagagaggacccaggtggccctccttagttgactctggtgttgcttgtcggttccactcacggcccctgtggtcaggtttgaagactgtgtggtggtcactctgtgtgtgtgtgtatgtatggctccacactcatctcctctatggaatacttttattgagactaaaagggtcagaggagtcagctttaaccctttgtgggttcacctgatccacagagctctgcattctgaaccaaaagccagccagtagatctagtcaaagccagagccttcagggcagcacccaattccttcccaaggctgttgcttatctctgcactctgagcgcccatttacacagcaaacccttgctgaacacccaggcccaagacccacatctcatgaatgtgttgtgtatgcatctagggacggacaagagactgagcccacacaatgagataagtgctttgattgaggaagcagcagcaggagaaattgctgattagaaactcactcactacggtctgatgcctattacctcaattacccataattgacaccgctcctggctctgtgacaagccaggggaagtcccaggtccatgaggcaaagccctcctggttttcaccaggagccagaaggcaagatttgaacccaggactgtctgactgcaaagcccttggcctctgcatcatccgcctcagataacaccactagtggactggagagggtcagacgcttgatatacctttggtgaatgaatgggcgaatgattgaatgcctgaattgcaagtgtctatttcatgtgcggcttttccttgaggctgtgagcatctgttggtggcacggagtataccttctccgtgtttgaagtcccagtctggaacagaggagggacctggtgaataaatgaatgtgtaaatgaatgacgaagccatcagttagttctgctctggtaaagcttcctgacgttccactgatatgttttagaaggaagtcagactgcagggttagaagccatcccctccatgaggctcggcactgtcaggatattccagtctcacctggactgggccatgcagtggagtggaggcagggcaaagcctggcccaggctagtttgccttgcaacaacccctgtcctgagagctgggatggggaggcctaggcagggatgcctctgggccctcaggggaacttaggaggccattgtgcctattcccctgcctccatgccagctctcactcatcctttaccgctccccgccccccgggcaagcgtgcaggaccccatgggaaatgatcagcttctagcacagtgcctggcagtcagcgggcttgcaagaaatgttattcagggaaagtcaaatgaaaggaatagcgatatcagggaaggatgttctgtaatcaggctactcgccatggggaaattttccctccagtcatactgcagaggctgcagaaggcttctgcccatcaggtctgaatgactggccttggggaacacagtgtctgagagacccccaaagagcaccccccccaccctgaggaactgctcattgggtgggtcccttgcagagattgttttctttttctttttttttttttttttttgagacggagtctcactctgtcaccaggctggagtgcagcggtacgatcttggctcactgcaacctctgcctcctgggttcaagtgattttcctgcctcagcctcccaagtagctgggactacaggcatgcaccaccacacccagataatttttgtatttttagtagtagagacatggtttcaccatgttggccaggatggtcttgatctcttgacctcataatctgcctgccttagcctcccaaagtgctaggattacaggcgtgggccaccgtgcctggtctcttttttttccttttcttttttgagatggagtctcactctgttacccaggctggagtgcagtggtgtgatcgaagctcactgcagcctcgacctcctgggctcaggtgatcctcccacttcagcctcccaagtagctggaactacaggcatgcgccaccactgagctcaaaccatctgctggcctcggcctccgaaagtgatgggattacaagcatgagccaccatgtctgcctttttttttttttttttcttaaagacagggtctcgctctgtcacccaggctggagtgcagtggtaccatcatgactcgctgcagcctcaaactcccaggctcaagcaatcctctcaccttagcctcccaagtagctgggactataggcgtgtggccaccatgcccggcttattttattctattttgttttatttcttatagagacggggtctccctgtgttgcccaggctggtcttgaacacctgggctcaagtgatcctcccgcactggcctcatgaagtgcatgggattacaggcataagccactgcacccagtcaagattcttaaacttcttagaatcttgacaagctttgatgtggagagcatgtataaaatggaggttcctgggcccagtgaattagagtggggacgctgtgggaatctgcgttttgaacaagggttcctctaatgctgaggcaggcaggtgatacatggcctatattttgagacacaaaacctcagtgactatatctctgaatgctagaaaggacattgagaagatatctggtctttttctccccaaaaggggttgggttttgtctttagggaagaaggttcatggagctggagaaacctcaggggcttgggtttgatccattataacccactgcacccgtgctgagcacccgctctggaccagcatcacagcaagccctgggggaggaatggggagaggcagggaggggaaggtggcagctctctgcccagagaggggaaaagggcccaggtgacagagtgagaacgttctaagagacctggtcttgctgtgtccctcggcccatcttgggactcatcaagcttagctttggccaccaagattgctttgtttccacactgctaagtctctcttcctgcaaaggatattcgtataggggtaatgctagtggctggggcttttcttgggtctgacacagtctaggggcccaggaagcagggggaatccatgaagatagcgggacagtgcccccatcttgagcaccccacccctgcccccctccacccacgggaagatgggggtcgcatcccaggctgagatccactctctcctttttcccttggaggatacttcaatcctgcctcacggtcatctatttcattttacccactggggaagggcttctcgatattttacttcaagctttcctgctgacaaagaggcatctatctatcttccttttcagacaggggaaggaaagaggtctgacccggatctcatcctgcttctgaagcctattaaaaatgcctccagttaagatgacatatttaaaggaaaaaaaaaatgttgtccctggccgggtgctgtggctcacgcctgtaatcctagcactttgggaggccgagatgggtggattgcctgagctcaggagttcgataccagcctgggcaacacagtgaaacccggtctctactaaaataaaaaaaaaaattagctggacgaggtggcgtgtgcctgtaatcccagttacttgggaggctgaggcaggagaattgcttgaaacagggaggcggaggttgcagtgagccaagattgtgccattgcactccagcctgggtgacagagcaagactccaactcaaaaaaaaaaaaaaaaagtcatccccccacattcagtctagtcacattcctccctggtcagagaagctcccagttcccatcctgcttcctcccccatgtgcttctcgccttctctcctcccgctcccctcccattcccatcccctgtggaatggtggaatgcagggaacctcctgttcctgctgacaccctctcctcgaactctaggctgctggtggggggtgtgcaggaagaccagtttttccagccctgagaccaaggagagacctgcctgcccccaggggctcttccaagcccagtcagaaggcaacctgggcctctgaggaatgcggcagatccagctcttgctgccacaacgccaacagagtgaggtcggaggtggccagagtccagggccagcagggtccaaggacgtcccctcccactcaggccaggaaccaatgccagcagcatctacccccttctggtcccctcccctacttgttcagaggctctgggacctttcagatccacctgacttggccaggccaccccttcttccctttgtggtagtgatggggggtcttcaggttggcatgctctgctcttccatacttccttctccaaccagcaccctctcctcctcctcctcccttcctgtcccgcctgacgtctgcctccaggaggccttctcagattgaggggtcactgtgccctccagattgtaggcatcccaggatcagtgcccctgcctatttcagtcactgccatatgcctagggcctggcacacatcctggcctggtcatgtccagtaagttacacccacatacctgccagagcactgaactggatgtgtggagatgaatacatcttgcagaggcatgggctggctgaagagccaggctccctgcatcccgcacggatatggctcattggtaccctgctcgtccctgccagcccaggatgtggaaagagacatgggagaaaccctcctgactccctgttccctatcctacctctgacccaggatacacagaaccactgccctctgctccttcccactgttctgggagctctctcctctgcgaggctttcctggaacctgattggcgaagaccgtttctcctgagctcttttctctgagacatcaccatagatggctatgagtcaagtgcccccatcaaccattcctgctctgcctgggggcttggagtcccttctgatggacgaatgggtcagtctgaatcttggggtccctttggggtaagtgggaggcacagcagccagtgcagggggaggaggaggggagaggcaaacgctggattcacacaaggccaagacccactcagtttgcaagagtctagtctggttcacagcatatgtggttctccagacaaagtctccccactagagtaatattaataacagtgacacttgccacttattgagacttactttatgccaggccttgtgctaagaacttgacgtggcatttcatttaatcttcacaacaatcttatgtgataggtactattattgttcctgttttacagatgagcaaactgaggctattagctcaagatttgaaggagaaaacagtcttattttattttattttatttttttagagatggcgtctccctgtgttgcccaggctggtctcaaattcctgggctcaagtgatcctcctgccttggcccctcaagatgctaggattacaggtgtcagccaccacatccagccctcagtctttttttttttttttttttgcccaagtgtctggcatggtcctgcccacccagtgctgtgtgtgggaacctgcagatgttcacctgacatgtagtctgcttagaggggaggaggtctccatgtacagaggtaggcctaggcctccttgctcagctccaaggagtctgtaatccaaaagagctggcaccagactggagactggcctaccctctgctcatttcctaagaattcaggagggtaggccgggtgcggtggcttgcgcctgtaatcccagcactttgggaggccaaggcaggcagatcacctgaggtcaggagtttgagaccagcctggccaacaaggcaaaaccccatctctattaaaaatacaaaaattagctgggcatagtggcgcgtgcctgtaatcccagctactcgggaggctgaggcaggagaatcgcttgaacccaggaggcggaggtcgcagtgagccgagattgcgccattgcactctagcctgggtgagagagactccatctcaaaaaaaaacaaaaaacaaaaaacaaaaaacaaaaaaaaaaccagaattcaggggggagaaaaagatagcaggaagaacttttggacgaagctcggtgaagccttttgtgggcctgacatctaactctgtgcctgcgcagccagggtgtgtgcgtgtgtgtgtgtgagcgcgcgtgggggtgaacaggtgtgcacaggctctcggcacgggtgggggatggatggatgaactgcccggccctggatgcctcgcctcagatccctgtgtcaggtctctctcctgagccctgggggagtccctggtgggtggggctgctgtcaggactgtgttgtgatgttctgggcgggagggcgggtacagcacaggccctgacctggttgggcaggttggcccaccctgagtggcacctgtgaccaggcgccaaccccacccaccgccctttgaagtcatccagcctggtccagcccctcttctgggtcacctccctgaaaagaaatggggtcctctcagaagacagctcctcctgcccagggctggttccagtgggggtggggcaggcctggctccaggaggtcccagccccctcccacatcaccagtcactttggagctttgacctggcctccgcagggattggcagaggcccaggtgaagggggctgagtgaggggtggggaccggcaaggggttggagggctgatggagggagagggcttaaagaagctcagtgacaggcaaggggttccaccagggtggtggggacttgttgaggaagccccctgtccctttctgaatggcccatcggcaggaggtggcttggggtgttttagtccccaccatcttcacacacacatcccgcaccctcactccacgcaatgctctgtggctggcgtttctgtcttgtgtaaagtgttgggcaatcccagctctaagacagccccagcaccttcgctggatcttcacccctccttggcgggtgtacagccagcagcccctgtatctgtctacgcagcacaggctgggttagcacaaaaaagccatctgactcctggcctgacttggcactcgcagagccctggccatacccggctctaaagcctaagtccgtctcctcagcacagctcaggccggagctacaggctcctggatcctttccccatccgccccgcccggccctgagctgacctctaatccgcagggagcatcctccgaaaaccattaggcagccaggccctcccccagccagctccgggcccgacgccggcccagcccagcagtgccgggcgccgggcccaagccgaccccctgttttggctctgccgcctgatttctaccgcaggcagatatcttccgagaccccgggcccctaggctggcctcgcgccgctaccccagggccccaaatgcctgagagaggtggaagaactcttataactaggcttctgccccgtcactgcctactctagtcccgccagttttggggtagccgggggactcgctggcctcctgttcccgctgggagcggggccagggtctcgaggtaggggggaggggggatgcggcgttgcaagctcgggcgtggcggcccctcccgggctgggtcccgccccgccctgccctgtccttgaatccaaggcgggcgcagtgcgatcgcgctgcccaggcccgcacccgaccattcctccgtctctctggccgcctcccttctccatccaggctggcctcctcctcttcctccaggaagcctgccctgagggccacacctccttccctcctcaggtagctcctgtttctgcccactgtggcgtcacccaaacaacagagtcccagagagagggtttgtgttctggccttgggcaagccacttgacctgtccgaggcggcttgcccagctgtaactggggctattaaccccacctttcgagttagggtattagaggagattggcccagggagtgtttggtgatcttatgatgtagccatgaagggcagggacctgtctctcccttcgaacttgtagggactgccaccttccttcctgtgcccacagggtcctgccagggagaggagagaggacctggagtgacctctccgtcttacaggccatgccaggcccaggaagtgggtgtgtcctcttctgtcctcgcaggccaagaagaggaaggacaacatggggattgggggttagactgggaaggggggtcctgtgtgctggttctccccagaactctaggttgacagagcacgaggttggagtgggagaattcccaatgagaggcaggaaactggccaaaaagacccttcgagagggcctctttgaccctcctctccttatttagggtccctggggaaaggagaacttttcccattggtggtggtgggtgtctcagcctccctgtcaccggttagcagctttggatggtcctcccccaagttaggtcaaggtgaccatggaagtgacgcctctctgatggtccaaatcattcactctgagagtggacaaagaaaattaagacttgacaattgctgagcaggctgaaattttagaacacacacagtggagtgaaccatcttctaatcaagatggaagacagaaatgacaataggaatatttattgcatgaagcaatatatgtaatttatgctgaattttgtttttcttctcatgaaatctccgtcttttccaggcaagcctgttggtgtatgtttaataataagtttccacttatcgttgcttaccatgtaccaaggactgtgcaaagcactttatttctttagtttgtttagtttccacatctccacatctcatttattcaagattatttcaaggaaatatttattgagcatctactatgtgccaggcattattctagatattgggactagagatatagggacacacacatacacacacacacacacacacacgcgtgcgcgcgcgcacacacacacacacacatacacaaaatcagattaaatctctgcctttttggggcttacattctaatgaaggagaaagaaaggaaaaaagaaaatagatatttaatgtcaggtagtgataagtgccctgaaggaacccgaagcatcatgaagggacagagagtgtttgggagggcctcctggaggtggcatttgagcagagacctgaatgaaatgagggatcagccatttgaatgttgggggcccagcaattccgccaagaggaacagtaagtttaatggccctgagatgggtttgcttcacttggcacattgcacagcaagaaagccagtgtgtgagagcagagagggcttaggtgactgccagtggcagaaggcttggtgggatgtggggagcagtagagagaagtccatgaggaaggtactgttgttaaatccattttgcagatggggaaactgatgtatggagcagttaagtggtaagtgcaaaggctggatacaaaccaggttgcctacattaagcctgggcacctgatcattttgtgtgtgtgtgtgtgtgtgtgtgtgtgtgtgtgtgtgtgtatagtatttacacagcacagggaagggggcagggctgggtctcctggccagctctccagaggctctggtactttcagatttgttaagtgtaatgcaatgaaaatagaaagggctgggagtggtggctcctgcctataatcccagcactttgggaggctgacgtgggaggatcacttgagcccaggagtttgagaccagcctggacaacacaggaagacccccctaccccacctctacaaaaaattacaaatattagtgcggcattgtggtgtgtgcctgtagtcccagctgcttgggagggtgaggtgggagaattgcttgagcctgggaggttgaggctgcagggagccatgactgcaccactgcactccagcccaagcaacagagtgagaccctgtctgaaagagaaagaggaaagaaagagaaagaggaaagaaagagaaagaggaaaaagaaaggggaaagacagagagagagagagagagataaaagaaagaagaaaaagaaagacttctgaacacagtacaaatccccacattccccacatttgagtctcacgtgggtgggaaccatccttccttactatatgccccagcaccttgtacagaggagggcatatagtaatagtttgtggaatgaatggaagactattagttaagaagcaaacagactgatgttctagtgaggccaccagtttctatgaaggatattaagatttttgctgtgggagggatccttagaaacctacattgaaccccattgatttgtggatgaggaaactggggctcagagtgacggcagatggctaatgctgctgtgtggaagagtgctggggtgtgccagcctcttttttgacactccccagagttggaactgccaagagctcttctctggtaggagcaaaggctcagatccactggaattgggaacagtgaggcttgaaggaaaccttgattatccccactgtggaaaaatcagaaacaaatgcggcatatgggagtcagggatggagaacctggtctcagatgaagcttgtattagcaagggaagggaagaaatgatggtcaggtcagacccaaggaacagttaccagaatcttcctcaacactctttcctaccttttgtactctgtccaccctagacctcctcctctcccttcttgttttctcagcctgagcttctcaaatggaggcattaatgtgccctgagcatatgggatgtcccgggggatgaccaaagccattgtatgtctttctggcatgtctatttgacccagagattttgtttttgagacaggatctcactctgtcacccaggctggagtgcagtggcatgaacatggttcactgcagcctcgatcccctgggctcaagcaatcctcccacctcagcctccctagtagctggaatcacgagcatgtgccgccacgcctagctaatttttgtattttttgtagagatgggatttccctatgttgcccaggctggtctcaaactccggacttcaagtgatcctcctgccttgggctcccaaagtgctgggattacaggcatgtatttttgaagaaaaaataattcaattagaatatgttttagaatgtctgctttatagtaagcagatttggagaatatgaagtgaaatgtgcatgtatataacataaaacagataaaacagagcctgaaatgaaagaatttgtgagtgagttgctttgggtggcatctccctgcccaacttctccctagcccctgctcttacaggaatcccaggtgaaactctgagaaatcctgtttgcccatagcccacaggggttttttctcctgtcatttggagacggggtccatgccagactgactgtagggcagacataggtcagtggggaggaggaaggactgtcaggaagggccagagcctaggcaaagatcctgggccccacccttggtgacaagctggcagggccctcccaggatgggaacaaggtagggagtgttggtttctaggtaaaggtgtttggagcttggcacttcctggcggcggcggaaggggatgagtgtgtgtccacgggcattgggcggtggcaggtttcagcaggaggaggcctgagctgctggcacgagctggctctggcacccaatgctccgcacccaaggcctgctgtggactcagtctgcacgccatcggcatgccatctgggagtgagaggcccaggcgccagccagaggggtggcaagaaaggagggctgaggtggagggaggagggaagtcactggttgagtgcagggcagggacactggaaggatcagtcctggagacagaggtgggaggggagggtggtgtcgccaacccgggcttgggtggggctaggcaggctctgagggatgtggaacctgcctgaggtttctctggtcttggagagggtatcctttcctgggagaaggagcttactgagaaaaggactttctgatccctaaggtggagggactggggctgtgagcatctcattcctcagccatttgaaaataggatggtgtgggctggagagaaggacaacggactttgtctaacaataccaacattccccagactttttttttttttttggtgacagggtctccctctgctgcccaggctggagtgcagtggtgcaattgtgtgatcatagctcactgcagccttaacctccttggctcaagaaatcctcctgcttcagcttcccaagtagctaggactacaggcatgtgttgccctgcccagataattttttaaaatattttttgtagagatgggatctcactgtgttgcccaggctgatctccaactcctggcctcaggtgatcctcccaccttgacttcccagagtactgaaattataggtgcaagccagcacacctgaccctggactcttacttagtaccagccagtgctctaagagatttacttggattaactcatttaatcctcaaaataaaaccatgaggtaggtactttcattatgtcctattttatagatgaggacattgagacacagaggggttaagtccctgttctattgggaattcagacacctgttccagatggtgcccaagaatctgtaatggagtcaggcaaagacataaagagaaagtccactcattcgttcattcattcattcattcaacaggtattgactcaactggctttgtatgctgggcaccactttgcaaacagcttacaggatggactgcagtcctcacaacgatcttcaaaggtagagttcccacttcatagatgaagaaactgaggctcacagaggttatatagtagctcagggttatgtaatagtaggttgtggtcacagagcaagtaagtggcagaactagaattcataccccggttgttgtgagtctttgggcctaggaagagcccttcttgttagtgaagagaagcccacacatcaactaggaattgtgccagaaaatggaaggtagagagtgtttctaagagaaatccagggactttcctgcattcctcccttccaaatatctgtgctcagctctctggaagccaggtctacaaccttgctgggagggagcactctgcttagccagggaaaaccagaaaggagaagaggcaagtaccttgacccagggaggcaagtgccagtgggaggagtagggattattattcatttgagacagggttttgccctgttgcccaggctggagtgcagtggcaggatcatggttcattgcagcctcaacctctcaggctcaagtgatcctcccacctcagccccccaagtagctaggaccacaggtgtgcaccaccacacttggctaatttttttattttgtagaaatggggtctccctattttgcccaggttggtctcaaactcctgggctcaagcgatcctcctgccttagcctcccgaggtgctgggattacagttataagccactgtgcctggtgggattatttaaaaaaaaaaaatcaacttgttggtagagcaggatgacgtctattcagcactttgctccttcttcccctccgcctcttcttccccaggatgccctggacttcccccgcagggcttggttgcctctgccctccatctctcgagccccttgcctccagctctgtcctgcttctccctccaggagcaggccccacctggtcccacaggttatcacaccacaccaggtgccttccctgccttctcagaacccacccagtggctcatctccccctcagggctggccccaccctccacggggttcctggagtggaatttcccctaagggaggagttgctgattgcaacaggattgggccttgggtgggtttgagatttggggtgaaaggtgacctgggaaagttcataaggccatccccagggggaggaatggcttagccctgaggtaagagagagaaagaatggggaaggggacatgggattgggaggtgtttttttccgcagagctagccaggttggggcacccggatgcccttcaccttctccccagccctcaggcaggaactggggccctcatcgacctactctttggctgggcactggggctcctgcctcaggccctaaggcttgatagccctcttctacttctctttcagcgaaatccctccctccccaagagggaaaccaaggggaatttcacactacccctttctagaccacagaacctcagaattccctacccaacagccccgagcccgctgtcagggtccgcgccagttttcccttcactctatcttccactgaaactcttaggccccagggtgactgttggggtgaggcgtgagataggggaattgaggttgtgtgggaaggatggaccatggatggtgggctaggacacccagctgcacgtgcatgagtgcatctatctggtataggacatagaagacagggttacagagcctggggacctccgtgcatgctctcgccctggctgactcgccatcagcactcctgtcccacctcctggaacccccaaaccccaggagatgcacatctccatattgcctcttgatcagccgtggagagagaggccctagggaaggggaaggtgagaggcaattcttctccaagtcccactggcaggcctcctgtgacagtcccagcttttaagactctttctggagcaagcattgaaggggtgagtttggcttgcagttggagaggtggggtacaggctctcttttgccttcttttaccagcacgctcggagttgtggccctacggggacccggtgaattcagctgcctgtatgaggtgatgttgttttgccttaaatggtcccctagcctctcccaaagacccctccttactcttcccaagaatgtcccaattcctttcccacttgtgccactcattttcaagagaggagatggcccagccctcttctcttccccacctccctcccccaaactgtgtgaccctcagcacccagggctcagggggctgccagagatggagaggaggcaaacccaagccagctcctggggtcctacagggagggagggcatgtaaatcttgcctcaccctcttccctcccagccctgctgtcagctggccagccccatccctggagccaaactgcttccatgcaggagggagggaagcctgctcagtgggaaaagatgaagctggtccccccgcgtgtcagtgaacaaattgggccaatttggtgtgattagtgaagaattcacatctggccagcagagtcctccccccagccccagcccagcctggctcctgctccccattagaagctattttctctgacggctccatttgtctctgtagtgggggatttgacagctccctggccagcctgggaggcctggctctgagtgagaggcccaaggccaggctgtgtgcccacacccttgacctgatgccacgggggatgccatgctccaaacagggcccaggcacctgtatgggccctgtaggtcccatccctcttctgtgtgcacagatccatagttgaatgggggcctggggagcacagttcactaggctccctgacctgggccccccttgggccttggtcatcttgcacaatgattattgtgttttaagatcaacagagacttgtatgtgtgtgcatggtggtagaggaagcaggggtctggtgtttcctaaaagaaaacagctgggcatgtaataggcgggcctgcaccccacttccttcaccccttcctcacccctcccagagacctgttgctgcagctacccctcaggaatgcctgtagatggctgtcgcacagctggaaggctcgccccgagaagcggcttcaaggtagtgcctttgggggtgtggtctgctaagccttgagtcttcctccccgagcagcagcgaccccaggttgcctgtgtcaaagacaatttaagggctatttaaaggagcctgacctaggggtcacctgggcaaatctcctccctggagaattaccaccagatggcaacctggggcttgtctcctagaaggttctccctggttggctaggagctcctgggccctgccattgcctggcttgtgtgaatggaggcaagggtccaggaccttagtccttagatgaaaattcttcttggagaagggataactgggggaaggggtcctggactgcagtggagggcgggcaggctgctttttgttgtggtgtcacatggttgtgggggtggagagagaaaccttctccagtctccaggatttttccattgccacatggatacatacagaaaaccaggcagagtgaaggaaatcagacatctgtgatctctccaatctccaaacctgtcctgagaacgaatcatcaactctcccagtttgccccagactgaagggtttctggggatgtgggactctcaatgctaaagccaggacagtcctaggctaactgggacagctggtcaccttaccaaaatacaagccccagggtccaggcaaagggagacaagagaaaccagttgttttgaggtctgttgcctgatttcctatttgatcttatttagtccttacctgattttagcctgatgccttattattattcatagattctcagccttcttttcaagataatacctagcatgttggcaggatgtcccaatttggggttgagggcagtggggctgggggcaggtggcttggtggtacgtctcattcaatctgagattgcacggcttggggtatgaggtatgatgacagcaaccaggctggcctgctctcccagggtgccgaccacctagcacccatctccaattaacagatacaccttcagaacacccactgtgtggttgctaaaattatattcccattttagagatgggataactgagatggagtcattggccccaggcctgagttgggggaaaatggagcagggtctcctgagtattccacagcccttcctcactcacgcaccttaccagtctcctgtacgggcaaaggtggctgttttcttcaggtcaggaataaatgctggccccaaatgaaggcgagcctgctgctcctcccctgaaaggtggcctcagccccactcctcagacattaattacataattaaggatggagaaggaggaggaggtcaacctagcagaattctaaaggcagagaaaggcttcagaaaaatctagatattagatcaaacttctacctgctctcacagcagcaactggcctccaggagacggaacccgaagaagtcaagatttttaaatgtctgaaaggacttttggaggaaaaggggaccagcatcagatctctgctcctgctgtcctgggagcctggagctgctggggctggttccccatctgtcctgccctcactctacctctcctccaaaggccccttccctacctcagcctctcccttccccttctctgcccatgtacccagaggctggaggccgggtgcagtggctcacgcctgtaatcccagaactttgggaggccgaggcaggtggatcacctgagatcaggagttcaagaccagcctgaccaatatggtgaaaccctgtctctactataaatacaaaaattagctgggcgtggtggtgtgtgcctgtagtcccagctacttgagaggctgagacagaattgcttggccccgggaggcggaggttgcagtgagctgagatcacactactgtactctagccggggcaacagagcaagactccatcaaacagcaacaacaacaacaacaaaagaatccagaggctggaaacaagagctgagtttgcatacaaattgagcttgaagtgcctgtttgaagggagacttgggaaatcattgaggggttcatcccttctgatttcctactgagtccaaggactctggagctcctgagcatttgagaagctacgtattttagggctggactgtctagctgtcatatttaggctgccagttttccagaaggattgggtggacaaggggacctgtgtgagggaattttgtctcccaggagtcaggaggagtgggtgataggctgagctctccttctgggggaggctcttttttaggaatcgtattcctctaggaaggcccctctgtagccctgctgggcttctccgagaacccccaggcttgggggttatgtattccccagccttctcagagagaaggatgctctccccctgtcctggcactactgtctccatctcggagtctgccccagccccagccctagaagaagcctgaaggtgcggtgcttgcctgtgtacaccctgtttgaatttgcttcaagcctaaggcgacttcctgtttccatcaacaggtcccaggagagatcaaaggccagggctggtgagttcagggaagaggaattgaggatggccggtcccaccactatgtaatgagaaggctgaaatttatgtggagacctggagcatgggtaggactctggggacacagccgaatttccagggtgcttggcctaggcctgccggtgcctaccccgtcttatcactcctccagggagccctgggcatcactccattccggagtcctgaccccaaccacagtctgctcctcctgtgtcccccggcagcgtcctcgctccttgcagagtttgcctgatccacctcctagcacggggctccctacggagcctgggccacagctggaggggcaccctctctacggcgggcccgccccctgccccgcgcgccaggcgggcgtggcccgcggggcgggcgcccggcgaggggctccggcgcggcggccgtcactcacgcactcacgcgggaggaatgcagacggcagggctgccctgtggtcacgtccccgccccaccgacggaggtaggcgcccaggtacccagcctgtgggccttgggagcccgccaagctgctgatgaaaggcgctgccagattaaccctttcttggccgcacccccttgctgctgccggctgccgggtggtcgcagagcaggagggtgaggggcaggagaggagtctagacacgcctggctaacgagggggcggctttggcctctgcgcgcttgccgggtgggtgcaggtcccctgcccctgccctccccctttctctggccttaggaccctagggctgacatggttgagggacaggactcccaataacatcataaacctcaccacggggattctccactgggcacaacctcccatgctgatgtgctccctccttaagagtcactgtagctaaagagcactggacagagagtccaggaactcatgcagtcatccaacacaaattttaaaagctgagaggtggctgatgtctgtaatcccagcactttgggaagctgaggtgggagcatcgcttgagcccaggagcttgagaccagcctgggcaacatagggagatcccatctctaccaaataataagaataatattaatataaaatattagccgggcgtggtggcgctgtggtcctagctacctgggaggctgaggcggcaggattgcttgagcacaggaggtcgtggcttcagtgagccgtgattgtgacactgcactccagcctgggcaactgggcaacggggaaagccaagtgggctctatctcagtttttccagtctgtagaataacagggtcgataattcaaactatggggttatttatttgtgtctgtattcacagcaaccttcctttcttccccaggcggaatctcaggcagatgcctggtatagaattcaaacaaagcggagagtttctggttggagttgggagtgaggtccccctttccctctggcatcttcatctcatctcctgagaacccctagggaggatttcagggaacacagtttggaaagctttgagagctaggtatggtgtgaggtgccttttggctctgatatctttctttccttttgtctgcatctgctgggtgatgcagatgtatctctgttcagtgggggctttgccagcctggacatttgctacatcttctgggctctgtgtggggcattctgtgatgccctgagatctgggctccctcttccggggtctgggtgctgttatctgtgctccccactgaaaattggccctggacaattttcattctttgcccatatcctggggcttgggctcgccctctgtactttctttgttgctggatccagtacaccgtaaggtgatgttactctcaagtttcccctcaaccccatctgtctcccagaccctcctttctggtctgctaagagttctaagaatccaggggccaagggaatactttttgttttaacacagttgcagtggtacaagcgtgtctggtaggcaaggtgaggagggcaaagctcttggggctaaacctgcctcaagttcaggtgtccttctcccccacccccgctccaccctctaactaacagcaagggaatcttccagagatcaaagcatgtcggtaaccctcactgaattgggccatggcctgggagttcccagatctcttctccaactcatccagcctccttgggagcctcccccgccacctataaggggctgggagtgtcaagaggggcaggaaatcagaggctaagtcaggaggcagtgccaagaggcggcaggaagccaggcggcctcatgcccagccctaaccaccccccacctcactcctcagtggtctctatgagcctcactgccctgggggaaggtataccaccctgaagctgagtttccaggaggggcaagagaatctaggctttagctacagtagaactgcagagtagatctcagaaaggacttctcaacctgcatatccatctcccttgaatactagttccttgggtatgctttacacagcttaaaggtgttaccacctccaatataacaagactagaaatttgcaaatcacccttagtgctccgctcccttcaccatccaactggccactgagtcccatcctttctgcagcattagtggtttgaaggtaccctctttgctttccatttccattgctcctgattcagttgacaccttttctaaccagcccctgagactattgcaatagtggctggttcccctgactcccaggagcacacccccgtcctcccttccctccccagtccctcctccacactgcaccaagagggatgtcagaacacaggttggagcatgccactcttatgctcaaaaacctttgatggctccccattgccggcaggataaagttccaacattgcctggcatttacagcctgccctgatctggtgccaacctaccttgccagcctgggtccctactgtgtactttatctcctcaactccagccacatcctatggctcgtcttatcccagacctgctgtgcattttcatggccgaccaccttggctcatagacaagcttgttcctagcacttacagtgttgtgggggaggaggattaatcacataatcccgtaaataaatatatcctaacaaactctaagttcagcgtatctttaggaactcaaagagaggttataatggggatgggatttagactggggactcggagaaggcctctaggcatgggaggcactgcagtgtattggattcttgttacttcgaatgcttggggcggggcttatttcttcagaacgaacttcccatctgtgcccccagatttcttggcatctctgacctagcttgcatttaattctgttttaaactggagcctgtctcatgtgttgcagcccctagacggtgagcgaccgagagaagggagggttgctcgttcgtgcttagaacaccatcattcagcacacagtaggtctggggcacagtaggtctttaataagtgtgtttttatttttgaggtgaaggtatgcaaacttccacgctgaatgagcatggaaatagacctgaaagcaggaaacattcccgagaaatagtggggcttggcacagaagcaagggatggacaagacagcctcctagtcatcctctttcatgaaagctctgtcctctctctaagtgactcttatttcatacctcccaagatgcttcagagaatcttccgagttctggcctatgaaccagcattccatttggcccagccagcctcccctcaatgctccccaaccccaggtgatccatgtttgcatagagaggagctgttccagacagcaggggaggggcttctttcctgctgggagatggtggtcctggtatcaggagcccccaaccacccaggactgctcctccactggactgactgtaggttttggggaggaaggtgtccttcttgcccccactcctacccccatacactaaatgccatgcagttcctccagctccctaggaacagagcatagaggaaagaaggggttagcctgcctggctttgagcagacaagggaggaggagggagatttattggggagtgaccctgctttagaggccgcctccgcacacacactccccgccaccccactgcagccatttccaagcagacagcagcaggccatttcccagggtttccaattcaattctcttcccccgatactttcccatcagtggagaattttggatctgagcaagggctggggcgtggctgttgaacccatgaagaagccagactaacctatcaaattgcagcccggtccccttgggtcaggttcttggggtaagctctccattcaagaatctgatgtgggccgggcgcggtggctcacgcctgtaatcccagcactttgggaggccgaggcgggcggatcacgaggtcaggagatcgagaccatcccggctaaaacagtgaaaccccgtctctactaaaaatacaaaaaattagccgggcgtagtggcgggcgcctgtagtcccagctacttgggaggctgaggcaggagaatggcatgaacccgggaggcggagcttgcagtgagccgagatcccgccactacactccagcctgggcgacagagcgagactccgtctcaaaaaaaaaaaaaaaaaaaagaatctgatgtgatggtgagggctcaattcctgccacagagggacacaggagctggcctctgggaaccactactcaatctgagggtggagacccagcccctgttctgaagatgcttccagactcccgaaggacacaagatgaaaccaggacacagacgctcgtctcctctgtgctggtcagtggctaagatgccccagcaggctttccagataggggccactcccctagttcaatgttttcctcagggcagctgtgtctggtagtctcactgcagtctctcttgctgcagaggccatgtgagtggtggtactcgcagcacaggtggtatccggcaggtagggagcacgggggaggaggaatgtgcccggggcctgggcaggatgccagtggacagtcccagcagccccacccctacccatgacctactcaccccaccttctgccagccatggtccttgtccctatgccaggggtcacagccagtcatgggttccgggtaaccattcctgggaggagacccggcctccagacgtgagggacatcttctggggcattagtcattgccataactgccatttcacacacactgaccctggtctatttagtcctcacagttaaatattgtattacccccattttacaggtaggcaaaccaaggctcagggtgaagaagtccctgatactgtgtacctggtgcagcctgacccggagcagcagtggatggggcattgtgggggtcagagcagggggacttgtggatctgcagctcctggggttgagagtcaaagggtctttctcatcccagaaggaatttgtccccaccgtgagaggggttagacacggctggaagtggggacaaagcgggagcaggctcagcacaggagtgctttagccagcaccctgcagcatgccagggaccctgtgcaagaaccacctccacccgcctcctccctgcacccttccagaagctgagggagcaggtggggagatggtgactctccagagcccctgatctcagcagagagcctgctccctgctacagcgccccaggtgttccactgtccaggcggcatccccaagaccaccccccaccctatatgtctcagagtgatgcctccagaatgagagcaagggctcagaccagtgaactggggggaagactccgggctctactctccaatccctctgctccctccccctccacctccctcccgcaagcttccctcccaaacactcagtcattcattccccagaccacctacaaaccacccatttgcccagaccgcacagctcctctgcccagcgcagctccccaggataatggccgccccacccccacccttccaggatgcacccccaagcctaattaccaccttggcacctccggggcaaggggggcgctgacctctgtttatgcttggaaatctcttgggcagaggaggcctgttttgctctggacatcaaggagcaggaggaaattagagaccctcaacgaagccccctgtggtccctcccaccccacggccttgtctctgggcccaggctagtggggcaggacagaaaggcaggatggtggggacccctgtttgctcctctctccttctgggcacagtgaggggatgggagaaggaacaggcctggactctgtcctccagatgcaggctcggggaggactccccagaaagagcactggactgggagtcagagactggggtttaattccgctgaccctgactccttggactccccatcccgttgggcctcaatttcctagggtgtgagagacagctgatcttcttggtctctaagggctctcccagcttggggccgtgaaccccaaggaggtgactgagagatgctgctctcaatccagcctctctgcactgcagagagacccccttcccaccccagcagaaaagcagggggaacccaagtggatggaggaagctgcaggaggaggacaggtggtcaggacagggagacagagcagggtgtggcctgacacccatcaacactgggtgggagggaggatgggcgccatgacaggctaggagtggtggaagtcgagaagctctgggctggtaagctccactcctctggcatcagcaaggtggtagaagggaggccctcccctgaaggggcttgtgattctgcagggaccctctgcctttccaaggctatgcccccagcccctgcaaagtctaccctgaccaaaatcctagcagctgctccatgagggtagggaccagtttttgtcaggtgcccagtgtgggctttggcttagaggaggtgcccagaaaatctgaaatgaatgagtgcatatggagcagctttggggagattgaggaaaacccagatgtgtgaaccttacctgcagctgtgggaatggggagtgggcgggagagagaggaccatggggtggggtgttggtgggttcaccctcaccaggcaagactgagctggcctaggccctggaggccagggccaccagggctgggctggggcggatgaggtggtctctgtggggtccctctcaggatccctccttcccccgtaattacctctgattagcttcaccacaacagccaggctggaaagagaggggtgtttggaacgtgggggaggggacaaggtggagcagagcactcacgacaagccacggaccccagcagagctccctccccacagctcagaacacacacacacacacacacacacacacacaagtgcgtgcaggcgcacacaggcacacacacatatgcacacaggcgcaccacagccacacactcaggcttgcacatacacaggtgcacacatgcacacagccacacacacataggtgcacacacacaggcacacccgtgtgggtgcacacacacacacacaggtacaggcacacacaggcacacacacagacacactcgcacacacacacacacgcaccctgagctggaaaattgcaaaggagtccatctacacaggcccacagtggcagtgatcagggcaccaggtcctttaaacaactcacccaagggtattcaaaatgcaacctctcacccgctgcagttcctgggagggaggatggctaggcgcagcttctaggcagaggggagcggggaacagtgaacggaacaaacacttcagttgggaaaggggctgtggcagacatgtctactggcacaacgcaacgcccaccctggagcccccttgctggcagctcagacagttcctggtgtccagccgctgactctgctgtgtccctgcagagctgagggatctgcagacagctttgcccttgtccaccggcgtcctgccctcacccacccgctccttgagacaatccagcctagggccttccctgggagccaagaagctggggccccttctttctaacctgccaatggaaccctcgcgttcccccagactcatattccaggaagggctcctgaggtgaggagacccagcaagggggaaagtgtcccctcctttctcgactgttctggggaagagagctgtgagccaggcaggcactggtagagtgagggaagaacagtgacttcttcctctccagccttaccttagagaaactattatgtaatcaatagcagtattccttgaatttttttttttaaagcttgctctaggtctgagcaccaggctgccacgcttacagacgtcatttcactcgttctcttttagggagacccgaaccctgccctcagggagctccccagcactgcccgagttcgtacctcccctcacaacccctgccctcagggagcctgtagtctgatgggaaagacttgatgcacaaatagaatggacaaccccgccctggcctcctccccacgtccctgttctccaaaagggagctgggctttcggaggtgagaggaaccgcgaggcagcagcggtgtggggaaggcactcagctttcctggaggagcggctcccggtggcggcgggctgcctggaggaggaggcagggccaggctgggcgctgaggaggccgccccggtggcgctcccacgacccgggcaaggcagtctgggcgccgtctccggtctcggggcctgcggtcggggcaccgcggtgccgcgtttgagccggtcagctccctgcggaaattacaggggcgctcggcgctgcggtcgcgccccccggggcagcgcccgctggttggaggcgtttaaattgaaagcagctttggggagagggggcggacgcgggccgccgagcaaggggagggggcggcccggcacagcgaccccattgtctgtgcccgccgaggggtggaaccttgcggtgagctcggcgcggcgccccctccccgagctccggcccagcggcgctctcagctggttcccacgctgcgcagcgctggccacgacccctcgtcccttctccacctgggtctgcctcttggctcgctgactgcaagcctggcagcgcgcacgcgcacacttcctccaggtggccctcccagactaagcctgatatcaagtcgggcatcactgagtcatggaaggtcaggaaaacccgggttgactctgctactaggcttggtcaccttaggcaaatctccttccctctctgggctccagtgtcctctataaaaatgcctacctctttcagtcatttttaaagatgatttgagccactgtatgggaaagtgttttgaaaactgaaatgctgcaggtagctgagcaatacaagacgagaataagcccctccttctactcttcactgtgcgggcccttttatacacaggtgtgctggtgctagaaccatagcgctagtggtgggttggaggagaagaaaagcagccaacagagtggaggctagaaaccacggtggacttcccggagaagggaaatgtggagcagggcgggaaggagcaaaacggggcaatttttggagacaggagagagatgtctcctcttgggagaagctcagcaaaggccggagaagtggcttggggagagtggctgtttgcccagttgctgggtggcatgtctcctgggaaggcagattggtggcagctcctggtgcagtctctgggtgatgggtggggcctatgcctgtcacccctggggagtgtggggcgctccctttggcctgtttctggttctttttccaaaggctttgagtacctagaggctggtctctgggcttcgggcaccaggtgcagggatcttggttttattgttccctttgcttccatcagcaggagcaggctgtttaccaggcctggtgcccagggacgggccatgtgctccatacctggcagagctacatgtttctgccctacttcctgggggcccctaatgggcagccaggtatggggggcaaaggctatagtaccaagtccctatgaagggagcctgagacatacacacttggtggcaacaaggagagctgagcccggcaggagggaagtggcctctgtaagggttcccagatgaggggactgaggagcagcctggagaggagggaagaagaggggtgaggaagaggagggagggaaggcagaggggcagggcgggagtttccgctagaggcatgagggctgtcagagttccttcccagcccccttcccatctcttaacactgcaccctgcccccaccatcccaccctcaactcctcctccagagcccaaagcttctcaaaggcctgtaacagagagtgcttggatctggcagctgggatgaaatctacaagccggctttggagattcagagttggggtaaattagattgggggtgggctcagaggctctgcctgtcctttgcacctcctttcctggtccaggcagctgatgaacccacccacccaggatagctccctcaccccttggcatgtcctatgctagtgccagctgggcacagggcaaggaggctgtgggaaaataactcgagagcctggcgaggacaggtgactgcccagagtgaactgactggttagggctgggcctcccctgtccagagagctggccgggctcaaggagccttcctgatccctaggcatgggactcacgggacatgacttctcccaggggacaggggcccaggtttcccttgggtgtggggaacgcaggatggaagagtcctggggagaaagtcctcctgtagatcacctccttgcctttggaagatctcaaagcgtttagcctgaccaacgccttccttggccttctgcctgggaacctggtggtggggtaactcaccacttttcctggtgatgggggagagcaagctgacagcccagaggcctcgtacacatcacactcctagttagcaaccaaatactaacaggattccattcccgatgcaggccaacggctacgccagctctctgaaggtgtttctcctgctgcagttgttccctgaactccctgttgacagtcaccccccatttcctagtggaaaaccctggccctgtccctctccttccctccctcctcttcctcgacgccctcttcttccctgctctccaggctgctcctcagtccccaccttctcagagcccagaaagccttccacacatgccatgcacacctctcagaccatgaaagaggctttcccaagcttgcctcgtgccagaagcccgccaggttgagcagggatggggaagcagggagccagacccacgcaatccttggcctccagccccctgagtgtgccaggcctgaaagaggcagagacctatcttcttgcctaccttgcccggccttagggtcttggaggtcagggctttgggcagaagggagagggcactgaggctgaggcttctacaggccccaggccccaggccccagctgacgggcttcacatgggctgaaggtgactctactggttcacatctgcttggggccagggagaagaactctaggagtagggggttggggtctagctagactgggacaggaagaggcttacgtacccacctgggtcatctgtcatcaaaatgcccccaggtaggtgccatgagtggcaacagtcacagaagtgtccttgctctcagaaactcaggactgatgcttccagaaagagcaggctggaggagggagccaggtgagaaagtgaattgacccacatgacttccgaggctcccgcagctaagactctgcagtcctgtgatcccaagaacctgagcacctaagatatggtccctagatgctgggattgtagcaatcgtcatcataatgatagcatcaggcactgtcacaaaacttcacatgcccatctcaccgctccacagtgagcgaactgaggcacagagaggttcagttagcttgtcccgagagccacggaatggggagcccaaactgggtctgcctgacttcagaatctgctcacgtggcttctctgcagcctttttgtccctaaaccctgctctccgtagggtctgtgattcagcataccactaagtccaacactaagtcatgactcaacatctttggtgggaaacagcaggtgggaggggtggatcctggcagggaggctatggagacaactatctcccatcctcctcttctgggtgctggaaagcttcctggaggaggaggaagaggaggaggaggaggaggaggaagaggaggaggaggaggaggaagaggaggaggaggaggaagaggaggaagatgggcaagagagggcagaggagaaagaggaaaggaagagagtatttcaagatggctagtaggggtggccattccagggcattacctggggcacttggaggaagatgacgttgtttgaggctagacgattggagggacccagtgggggcaaggtgggaggacaggagtctggtttgggtgcattcccttctccaccagcccatgggcccagtgtctaaggacttagagcccagagggcaaagagggctcaggccatggccctctgagaaagcctcctatgcctcacccctcctccagctgctcagccctctgttgctccaggcgggaggccactttcagccactctcagacaaaatccctgggggaaggcccccccggctgctctctcccaggactgattacaagcaaacagctggaggcaaacatctgctcctctcccaggggaggactgtccttgttccctcaaaggtatggagcctgcggccatcttccctccccattaaggagacagctgtctttgcgggcatccaggagactggacagagagaagacaaaaaataaacatcactgagtgccagccttcaggcaagtggaacagcctcattttgccaaggggaaaactgtgacacaggcaggggaagtcccacagagggtcgatctggcttcaactctggctctgttctggttgtaaggtgctaggggtctgtgcccagtggatgcactctgcttctcccccctacagctcccacccatgggtttggccacagatgagttcagaattccatgaaggcatgggttcctcctggggacaagggtacatagcaaggctgcgggtgcctctcagcagccccagggaggcccgctccccacttcttgttgatgctacagcttttctgccagctgggttgtagttactgttgacctttactgagggccttctaggtatcaggcactgggctaagcatcttaacagatgccatgtttaatcctctccacagccctaggagataggttcagtaactctcaccattttaccgatgacagaactaaggctcagaaatgtgaaataatgtgcccaagattacccagctgtacgcagtggaggtgagattggcatccaaaaccttccctctcaagctctatgccactccctttggtgatacaattgctgagtatgtggctctccgtctcccttaaccagggtccggctggattggaacagcaaaccctctctgcctgcctctggcctcttcttgcccccttggattgaagaattggctcagggtgctgcctctgacataggttgcaaaggcaagtggatgaaattggacaagctctaaatccagtttcccctctgctcaccctgtcaccaactggggttccagctccctctagggtcagaaggaaatgacttgtggggtacccggtgtttggcaagtggataagggtacaggctcacaccctgtcacttgcttgctgtgagaccttgggcaagtgacttaacctctctgtgccccagtgctggcatctgtaaaatgaggaaataagtaccaggctcatgggataatgataggatcgagctggaaagagttcacagagtttggagcagtgcctggcatgcagtgagtgcttctgctattattattagttggagaatcaagagacaactgtttaaaaagaggagcggccaggaagtataggcaagtctatcaaaaagacatggttgattttgggggtctagatttcctaattattcaaggctgagggtccttgagagggaagaaaggggtgaatggtttccaggtgacatttctgcttccccacacccatccccaggagggtgaaattcctcacaggtctctgtgcgctttcatgtgaagcctgccgagccctggccagcattcctctgtccatcctgtgggttgggagctggtggagaggggtcattagccctttttcagctgtgtaaagtgtgagggtagggccccagcggggacctgctgaaagcggatgtccctccactcccagcggaggggcttcgagggaggaaagcccatctaggtgggtgttcagggctgccttacccgcccctcgactcgtgcctgcaatgcaagcggatgcctgtgacacagactggaggaccaggttgggccatttcccctgctgacatccccatcccgaggtcccctggaaacagggttttgtgtggacaccagggaacatgccgtgctgctccaggggacatgaccctcagttctgtccctgcccctgttctgtccctgaccctcagttctgtccctgctcctgtagctctcaggctgctgtgggagggcaggagctagggagaaggccaccccagctggtgagagctggggaagcaggtgagattgaggagaaagttggatgggtggggaggtaagggcaggcttcctggaggagggtaggaaagatagagggaggatcaggactggtgcgacggggttgggtgcagggatgtggagacctgctctttgaaccctctgcctccatgcctgtgtgttcttctgcacccacccacttatccatccatctatccattcattgacccattttacatttacctgtctgaacaggacttatggaagccctcacccattagctggagctgtcccaccacagactgggctaaatggccagtggtaagcttcgcctcactgataggtggtaagcttcccctcactgaagtgttgtgagagctatcatgaggggggacccccacacaggatgggggctccgttacatttcttccaaggtgtccttcctgctctagggtactgggaggttttccacctccagttcttccctcccaggatctgaagttcgtagctttctctccagttgtcagttgcttcaccttcatcctgtctccttccctcccatctctaatttgcccctcctccccaccaggcccacgtgggcttctctatttccctcttctccagcctccctacctccactctggcttctgctgccaccagggatagctctgaaggactttgctgtaagcgtggacttcccttgctcaaaagctttccatggctccctgttgcctgtagggaaacatccaaactcctctgtctgcctttcaaggccttctctgagtgggccccaggcacttagcccacttttacgcatgaaagccactccaccttcagcaccttactcaccccttgccaaccaccttgcttggagaactcttaactgcaacttttagctgaagctcagaaaatgtcttcttgatgcaagctggtgccctcagcaaggcagtgactgagttgctggctggtttctttgagggcaggggcacatcctttcttcttctttttttttttgtttttggagatggaatctcgctctgtcgccaggctggagtgcagtggcgcaatctcggcttactacaacttccgcctcttaggttcaagcaattctcctccctcagcctcccgagtagctgggaccacaggtgcctgccgccacgcctggctaattttttgtattttagtacagatggggtttcaccgtgttgcccaagctggtctcgaactcctgaactcaggcaagccacccacctcggcctcggcctcccaaagtgctaggattacagacgtgagccaccatgcccagccctggcacatccttttatgtttgtgtccccagtacccagtagctggcatacagtaggtgctcaacaaatgtaactaacagtcaataaatttccatccctctgctttgaggacctcccatcttctcatcactgcttgcccaagtctaacccatcctttgaggtcatctcagtgcttctccctccttaacacctttcctgggcccccatctgggaagctccactcttccctgaacctccatggtagattatttttgtcatccttgtgcccagtgactctttcattgaactgcaggtttctacagggcaggaactgagtctctcttcatgtcattggattgctattaatattgctataaccactaatgctttaaaaacatttgtccacaactctgttctaaattaagtcagcagggccaggcgcagtggctcatgcctataatcccagcactttgggaggccaaggcgggccgattactcgaggtcaggagtttgagaccagcctggtcaatatggtgatccctcgtctctactaaaaatacaaaacttagctgggcgtggtgatgtgtgcctgtaatcccagctactcgggaggctgaggcaagaaaatcgcttgaatctgagagcagaggttgcagtgagccaagatcacaccactgtactccagcctgggcgacagaatgagacaccgtctcaaaacaaacaaacaaaaaccccaaagaacatattaagtcagcagacaatgattgagttttttttttacgccgctgcccaggctgaagtgctatggtgcgatcttggctcactgcaacctccgccttctgggttcaagcaatgctccagcctcagcctctggagtagagtagctaggattacaggcatgcgccaccacacccggctattttttgtatttttagtagagatgtggtttcaccatgttggccaggctggtctcgaactcctgacctcaggtgatctgcctgtcttggtctcccaaagtgctgggattacagacatgagccactgccccctggctccagtgattgcgtttctgtgtctagtatgttctgggtactgctccactgctccaggccaggggctcacagtggcagggcctcatagtcctctggaggccaggggaagagagaccattaacaaaccctttgaggtaaggcttctctggcctccagccacactgcagagctgaggttactgagctgagaggttgcatttcctgctagggtcacacagccaaggagtgtgggggtaggcccccacaggagcccttttacccagtgctggcttcagcctacatacagccacccaattcagatggatgatcaataaagttataaatccacacttttggatttctttttccttttctttttcttttcttttttttttttgagatggagtttcgctcttgttgcccaggctggagtgcaatggtgcgatcttggctcaccgcaacctccgcctcccaggttcaagaaattctcctgcctcatcctcccgagtagctggggttacaagcatgtgccaccgtgcccggctaattttgtatttttagtagagacagggtttcagcatgttgatcagactggtctcaaactcctgacctcaggtgatccacccacctcagcctcccaaaatgctgggattacaggcgtgagccaccgcgcctggcctggatttcttttttaaatgatagcagccaggtttggtggctcacccctgtgatcccagtgctttgggacaacgaggcgggaggatgggttgaggccaggaatttgaaaccagcctgggcaacgtgggggcaagaccccatctctacaaaacaaaattttaaaaaatgatagcaaatgcagcttcttcttttatttggagtctttgggttaggaacccagttggtgccccaactaggtgatgagccatttctatttctgacatgaaaacgcattgcaggggcacttgttacttcccggatagacccacgctccacctgcttcctctgtggcgtctctcctaaaggaagagggtcaggcctcatctctcaggcaccttcttcccacagtggcagctcctatgatcaggggttgggtcctgggcgttcctgcattccctcccagggcagagaagggttccgtccaaactgggaagtgatccctgccctacccaggagtctgaccccaatctctcccaccgaggccaccaccacgtccccctgctctggccccagaggaaggagcagagtgtggctccagtggggaagcctctgcccctggacccctggccccatcgcggaggtcctgccttccctgctgtagagctggctcccagcccccaccaggctcacctgcttggcttccatcatgggggacagagatgttatccctgggggtatgggcctcaatgggggcattgttcccgccccatccagagcaggatcagggaggggacagggcagagactgggattgtcccaggtgccacacaggccagctttgtcctcctccagctccccctccctctgccctcctacctgtccggccccctccctctcacccctgcctaggcttctggctcccctcataggctcctctgtagcttggggcaatgcagctgttgcatgggtggggttcagcctggccccgggcggttgtgtgggagcaagatgtcccctccacatgacattgctctttggagcagggcctctcctaggccaggcccagccctgcctgcccaacttgtctgctgatggcacccctgtctggggagcaccctgtcccatcctcacccaggcctacccactcctctccatgtaccatccagacctggtctaaccgcatagagatttcctgatcacatcataccgagaggcccccaggagggaggacaggctgcatataaaaatcagttcccaacgctgacctgacagccaggactcctggattcaggtcccagctctgccagtagctgtgtgaccttggtgagtcatggtaccctggaggcttcattggtcccatctgtaaaatgatagcattggactatcttttctaagctcctgttgggctttgaccttgtgtggctgcctcctgggaagtagagacgctgctggagactgaccccgagagaaaggagcccccgctccctggcctctgcctctcctcaacctccagcctgagctttgtccccaaagcatgagtgacagccaaagaaagctaatggaaacctgcactgctgcaggtgaaactgatctccagctccagatccagtttctcctcccggctggcccccagtccccctcacacctgctctggtcccctttgttcgttaggccaggagcagtcctgcctttcatccacctcctgccccattcatgccttaagcctggggcaccgcctcctcctacctcctggctggggcaccattgctgtaggctggccaagcgggcaccccaggtccgggcttttctctcccttccgctcacctggaaagatcacagggaaaggagatcaaggtgggggagcgagagggcaggaggggaggcactgtgttctactggatgcagcaagttcttaatgctgggagttttggcttcttgctgaagaaggtacaaattcaggagggcttcttggaggagggggcaatgtcttacatagatttagcacatgtttgaacccagtggtgcctatgaggagatcctgctcttcctttcaggacttgtcagagccattcattcattcattcatttggcaaatattcattgatgttgactctgtacaaagcactgttgtaggtgttgggaatacagctgcaaacaaaaccaaacccctgcttttgcagtttctattcctgagtgaggttgggaaagtcagacacaaacaaatagatattagttggttatgattgcttaggagaaaaattaaaatgggtaacgggacaccaagtgaccaagtgatatttaaataaggatctcagcaggcctctcaagaagttgacatttgaagagagaaccaggtgggcagctgggggaagatatcttaggcagaggggatcgtaagtgcacatgccccgaggtgaggggagtgggcctgttgagagagtagcaaggagtccactagggctggagtagatgaatggaggggagggtggtaggagatgagtcgagtcaggtggcacaggacctcgtaggctgtggctgtgacttctgattttattccaggtgagatggggtaaggaaaacagccagggtgcctctcctttgggtaccctggacggctctagcccccctctcttctttactgccccccaggattagggagaagttaagagctcaatttgggaatcagacctaggtttgctcatccatcatcatccatccatccatcccaccacgcatccatttctttgatgatgtttcctgcatactctgtgcttagtgaagccacttactagacggctcaccttgggcaagtggtttattttccttttctgtgaagtgcatccagcagtcattctttcttacttcagaggagcaggacccagtgtttaacttgcttagcccagcatgggggcacagtgagcaactgcttcatccatgcctgcgaatgtgactcatatatacaagctccccgaccccaaccggctctgacccactcagggaagtgtgacctgcgcccaccctactcccagcagtcctcccagagagagcatccctgccctgtggccttagagcctccttgtgctcctctccctacctcccaaaatgtcccacccctgcttcctactccctgctccctgacctctgccctctaccctctgccctctgcctctggccccaagcatggggtcaaagctcatcagaactttctctctgggcctcacattctaattcaccctctttatttgtcagtctgcctctgtccacctcaacctgggggccgctcactcaccatcctctcagaaaaggccgggcgtgccttttgtgctgtcatgtgttgggccccagctgggggcacaaagacccagagacagaaccttaacttctgaggagcaaagcctggaaaaagcccaggctttgaagccccagagaactctggagccagacatgttgagcaaaccctgtccccagcacatcctcgctgctgatccttgctagtcccttcatgttgctgggtctcagtttcttgatctggaaaagggaatgataacacctgcagagttgttggtggatcggagatcgtacacataaagctcccgcatggagaatgtgcttctcaagtgggtgttgaggagctggggtgtatgtacccacactaaggcagaagctctggccccggcctgggagtgtgatcccagaaatcatttgtgtgtgtacatgtgtctggggtgaggatccatagcttttgtcagattctccaaggggccttgagccaaaaagctggcgatgtgaggatggcacggccaaaaacttaaacagagtcaagaagtcaagtctaaggccaggcacggtggctcacggctataatcccagcactttaggaagctgaggcgggcggatcatttgaggtcaggagtttgagaccagcctggccaacatggtgaaacttccatctctactaaaaatacaaaaacttagctgagcgtggtggcaggtgcctgtaatcccagctacttgggaggttgaggcaggagaattgcttgaacccaggaggtggaggttgcagtgagctgagatcgcgtcactgcactacagcctgggtgacagagtgggaatccgtctcaaaaaaaaaaaaaaaaagaagtcacttctagaacattcacttgtccattcatatttttcaaaatcaattatttggacaacatatttttggtacctactctgtgcgaggccctataagtcaaagactcatggggacccccacccccatcaaggtgccttctgtttagcctcatggggacgctgcacttgacagcttatggagagcctcatccaggtggtcttcactgagcatttctgctcccctgtaggagaggcagtgtggggggcgcaattttacagatgagaaacttgaggctcagagatactgagtgactggccgaaagtcacacagctgatgagcaagacaggtaccacgagccctgcactcatgccgccctcctggcatctccactggcccccaaggagtagaaagctgcttgccctacaaggggttccagggaccaccctctctttcagcctcggcaccaaatagtccagcctcctccttctcacctgtggaagcagtgatggcccacagatgcctggtacagctcacccactgctccctgccattggaaccttcagggccctggtttggcaaaaggggatccttccagaaattccaatcactgcctgtattttcttcctcctcagtgctgagggatgccatctggcctcgctggaagaggcagcctggctttggagttgaaggtgtggaaggaggggtgcctggcatgtgaggcagagttggtggggttgtgagagatgggggaaacttgcagcgggaccctccctccccacacagctcccactgcacacacctctccccccgccacagtctttttgatgctgctgaggctaagccaggcttcagcccacgcgaaactcttcacacacacctccagctccaggcggtccccaggacctcgtcaggggctggccccgtgcctaggtcccagcccagggcgccgagcagcagcgaggggtgggaggccccgtgtgttccagtatttatttatttgaaggcccagcatttacacatacctggctctgattaccccccggggcccgggaggagggggacgctgctgcttgggcctttgatgttccagagaagagatggtgagatgctgttgggagtcacagctgctgtggggtgtgtgtgtgtgcggggagccctggtgatgtcacctcaccagactaaggatggcaggcactgtgctgggcccagggatgactagaaggggtcagaagtgggaaaaagagaggtccttcctaggccgaactcttggtctccagcccagctacccccaccagggccacagccattgtcttgggtttggaacacggatgccctttacaggagcaggggcaaaaggtggcagaacctcctctcacagattgagggaggcagggaggcaggaaccaccaaagcccggcggcacaggccacccccacgccacagagaggcccgacaaagatctggagatggtgacacagcccccgaggaggtcaatgtcaaggagtcagggactacatggtacaggacagagacctgctcagaaccaccaagacccaccatgatgtgctctgttagtgggtctcctgtctcccccaaagatccagggttaccaaggggatgcaaactgagtgatgagggtgcttactcataagtgaatgaatgaatgaataaatgaatggagatgttgacacagatgcaaagacagaaagacaggagtgcatctagcacagctcccatatgccctgagtgtccgcgatggctcaggcactgtcctagggttgagtgaatgaggaaaagacaccgagagcactagggactatgtaggggaggggtccagggaaaagcagagcgagagggcaaaacaatttcagaagctgcaaaaagaaacagtacaaagagcaccctatgcctttcactcagactgatctattgttaacattttacctcatttacttttatcattctttctctatatacatccatgtatatgtacatatagattttctcctgaacaatttgagggtaagttacatctatcatggcctttgaccactaaatgcttcagtgcgtatttcctgaaaatagggatattctcttccttaacctcagtatagttatcagtttcataaatttgctttgatagaatattttatctcatctatcatccgtaggttcatattccaattctgtccattgacctaataaagccttttccaggattttcctttctgtaggtcacagatgcatcgggagagagacaaagcagtggcacagctatctagagacgctgggacagaggagccagacacccagtggggtggggatgagcatgtataggagggcggcgcagaggagaggagtggtctcagtagtccccacaggtcagaatgtcctggccttacactctgcagactttgacaaggcaagggggcagcccaggcctagaccactcagtccagcagggtgatatgcctccaccttcccagaccaagggccccattttgaaagtgtgctgagacccagatacccggctctcaggaacttctgagctagctcctgagaacttgggaagcttcctctcactcaaacatctttgggctatcaacacagaaaacagaaaaagcctgactttcaaggaggcttacgaagctgcacagaccggcgtcccattcatttggcctgccgccctccccagcacacactcgggttgggagtgcggagcagtgggaggaaccccacatcagttgttccagatgttccagctggcgagtcccaggctcagcagggccagggtggccagtggggttgtggtgtcccagtctcagaggacctccactgataggtctctgggatttatggcgggtagagtctccacccagaacttccggggacagctgcaattttccccttctgaggcctcttctggaaacagtcccctctgctctgaagggctctggccccttccccacactcttgttccggctagagatggagccttccaggctgggctcctgcccatcttctctcctgccatatccctacgcctagaacggtgcctggtgcctagtagatatcaatacatatttgtggaatgaatgaatgaatgaatgaacagttcttatttctattcaggggaccaaattagcatatgtatttatggttttagggctccaccaaacaaatcactgggtcgctaatcctggggtcttaggcttggtgcagcagtgggtgggagcacatttaatccacccatttgccaaactcaaccacctccaggcaccacctattggaaaaggagctggagagagaatgcatgatgagagagagaggggtcccaggaagagagtgactacctggtctttacccctgatgaagagccagtgggtggagcttgcaatacgacactgcatggtttgatatcaaaaaggacgtctcaatatattttggtgtatcttggatggtttcactgtcaatgtgtccagaggcagggagatgccagagatgacttcttgaccctcccagatggccctttggggcctcctgggcccatccaaagctctgcccaccaggcgtgggtggctggactgtggatggttggctcaagcctgcatcatttggacggcgccaaccgggccaaaggtgccccacacattgcctgtcccgggatggtgtccaggccttggtccccagggtcctcccacccctgctggacagcagcctctcccagtgactcagccctgacgtcgtggggcgagcggaaaggccaagggcgtgggaggtggtggctccctccctcctgtcctcacctctctgggttcagtccccataacctccttccttcccgccatccccgttctttcatgagcctctgtgcaggagctattgccccggcccatggagacatgccctatgtgtgcccaggtgtgtgccaggccaccgtgggtcatgggatacaagaaccacagtgtgagagagctcctggctctggatcccactccctcgcccctcaccccagcagtcccaccctaatagagggttggggggcaccagctcctttcttaggtggcctggggcactctctgttcacacttggggatctctgtgccccaggccctggatccacttgtctgccccctgccctccagggcctcccttaggtgtgtgatctcagctttttttatctcccctagatgggagaggatccctgggacccacacctccccactgcaggccagtgcactggggcctccaactctgtcccacctgcaccccgcccagctgccccctcctccaacccacttcaaagcccagagccagcaggagctaattacatgccccccacccccctcgctcgttaagtgtcattagctccagtttacagatgaggaaactgagactggggaggtagaggacgtcaccccctccgtccccaccctggctcccgagccagcgctggcacaaggtcccagggccctgccaagacccctcttccttggaggacctgggggcccagtgcccatccccagctcccacttcctgccttccccgagctcttctctcctttccttggaaggaagctgcgggcttgggcaaacagctgctgagtccctagaaaggggtgggcagggtgcctctctgaaatcacacataggcaaaatgcaaatgagccccccaattattatagagtcagggcggtggcacttcaggtaataggacttggggagtggagggaccccacacctatccgcttaccagcttgccagaggcccccgctgtgggcaggggctggtgatgctgtcaccctgagtgaggctgggatacagtggggtggggtgagaggaggatgctgacactggcatggcttgggagggcgccgacctgatgttgtcagctaggacggccctgccctccgggaccagagagaaaccccaaacctcagcttctccttgggaaagcagaggcttccctttgtggtttgggagcaaagccagctccttgaccctgtttgactcggccatctggggcttagtgggctgtgagatctttgagacaccccccagcaaaggggaagaatgcccccctgcttacagactgggaaactgaggtccaaagagggaaatggtttgtccaattgggatcacacagcgcagagggaaaagcagagaatctggagaacacagtcagtgaaattaggactcccgagggaaaggggcaggctagggagtggggagtggatgagaagtgcaggaactgtacggagagaatgcactgggcactaagctgtccccttcccaagtgctgggagcttagggtaactttctcttatggctcctattgacagatagggtaccgggcctatgacaggagagaaatacttacctggttactagttgagtttttcagtattaatgactttatgaacatacaggagttaaaattgcagcatcagagatggaaggcagacttcaggaagaacttcgcacttttgtggatgagggcctttgagataggtggcgaatccatgagcaggcattctgccctgcccagtcctctggttccctctctgggttactggggcatctctcacatccatcccacagccttccccctccacactgtcctcagcatggaatgaaatgcctgtggactttgtcatcatgagaagatcccacattctggaaaaccggaggtgacatcaccacagctttgcaccaggtgtgcggccaccactagctgagcttttgcccctgcagctgggtgggtctcaagtgagatctaagggggagagctgccgggggagggggagaagtcaggaagcagagggaaccaggacctcagagcctgactcctgtccctcccttctgtccccaccttgtctcctcaacaggtctttcagagccttctaggcctggtgactccttgtcagtggccaggggcacatgatgtgactcagaaaggagagggcagaaggcaggggatctggctgtagcaggacttagtgggggtgtcattgcccttctctgagcctcctgttctccagtgaggcgcctggactggaacagtggcttttacaggggtaaaggagtctgtgttgttgaacctgcacagaaggacagagcctcccatctgtccatatcccctataggaaaccctccctgagtccccgctgccagaatgaatctctctttcctcggccctcatcagcaagcaccgaagctcacacattcctgggacatggctcccatgccttgcattgctgtccggggactcctgcccactccccacctagaacaccagacctctaaggcagggatgtgtccactccggaactgacccaaggcttgggcgtcaatgtgtcagggctcagtctcatgcagcctgggtggctacaatgctcttggctgtccccactctgggggagtttggagaatacccccagcccccaagaaggcccatttcttctgtttggtttggtgacagagccccgcccgggtcctggtgcattacctgtgtgctacaggccttgggtgtggcattttccctccctgggcctcagtttcacccgatcatggccaaagtcctttgcagtttgaacattacatcaaatctatactcagaaactaatttggtccacaaactgccctgtccctccttggttcatttgcattcatatttgcataaatctgcatggagcatccaacaatctctacggttctgctgagtggccttcttttgatttctggtctcattcctcccctaagtgacctgagtggggagctagtgcaatggccatagacctgcttttgtctctatgaccccatcaatggcacatcatgtgtgcttcataaatccttgttgaaatgaaatggccaagagttgggcaggtacctggtgggatgggggtgcatggggagtggctaactcatggagcggtgagggggtggggttacagggggtggagtagggaaagcagcacaggggcggtggggagatgagtccgtttctacacccatagatccgtcaagatgatgaaatggggtcccaaagaggtgtgatggctgcgaaggccatagagctggttagcagcagagttcagactagaaccatcacctttggactccttgagatgccaggctgatgctggagcgccagagtggggaactcatggaactcatagtgcttgcggggagctcctcagagtgatgggggaggcaagacaccaaagcactcaggatatagacacagggaaaggcaacagcatgcagactcagtgaatatcgaggggtgggggtgcggatgggggtctccccttcccacttttcctcctcctcaggctaaaaggtgagctgcgctcatttcttcagttacaaggaccagagacctgcaggaagggggtccctctggatggtgaagggcatcctgggttgtgaactggcccctgagaaactggcagaacccagtggagaggtagaagggcagtgagccatggtcctgatagtcctttgagatcctagagggtttctgagatgggggtgaaaccctctcccctagaggccagagggagtcaaggaaagcctccccatccattgtgggctggtctgagaccagtctggtgtgggggcaggtattatggccctaggacctctcaaatgtttccagccccgtgacccaggagggagtccaggaagctctgcgaagggcacgcggggccaggccacctgcaacagctggtattcgaggccgtctgcctgctcctccctccactctcacccaccatcatcatcctgggctggcacctgggggagggttggcaggtgggattacatcgggtccccatgcccctctgaggggattacagcatccatccccattttaggccccaggggcagcgctaagggacagaggctgaggctgggggcagacctggaaatcctttggggtgctgggactctttcttcagagggtgaaggccagggcccagccagctcctccattctcctcccctgcctccatttcatcagccctgctttggaagctcttctgcaggccactcagaggggatgggtggggagccctgggcccaggccccactcctcctgcccaggactctggtgctttggctggacaccatgcctctctggatagggcgcctcctgcggggagaccaatcaatcctctggctcatggaactcacagtgcttgcagggagcccacagagtgatgggggaggcaggaaccagtctgatgggggagccaagacacccgtgtgctcaggatatagacacaggacaaggcagcagtgtgcagactgagtgaatattgaggcgtgggacacagggaaaagggtagacagggtttgggtgggagattcttggcagactgcctggaaaaggggcaaggggcacctggaacctaaggagaggagaagaaagggatgtcgcctcagacgatcatctcagacaatcgccccagatgggctgccctcccctccccggtgcccaccctggccctcctggctctgccaagccgaagcagtcccgagccagtgcctggagagcagggtgcgcaggtgtttcctcagacagctgccttaactcagcgagggctcagaggagctgccttccagggcccagagaagcaagctgagagcccaggagagaagtggaggagggcagacgggaagccagaaagccagtgccttagccccaggcccgggggctgaggaggtggaagaagaacgttcagtgctcacggggcagaggggaagatggcagggatgctggggcccagatgcaggctgggccggagcgctgactacactcccctcccctgtgacaccctggcccaccctggctctgcccaaagccggcctggcccccagcgctcccccagccaagccagccccaaagctgctgcccagagagcggggtgccccagctgctgcgagggttcgtcggtggagcctcggtgggggttgataggagactgccaggcgccgcttaataggattttaattatacagctccagcaagaattttttcccccctgggcttgagccctcacagatacctccatctccacctcagcatcttcccagccctggcagctagctctcccaggcccccgctgcctgccctccacccaccgtgggggacgctggcccatctcctgggggctcaggaagggcctggcatctgcccccagcaatgatgcagagggcgcctgctcctgggggggggtcctggctccaggagctcctctgagctctgcatccaggactggggacggtcagagctgactctggtgcagggcagagatggtgcccctgccattcaactcactatggactcgatgctcatttttccagagtgattctgccccatgccaaaccctttcgcgatgattgtctcatgtgacgcttacaattctgggagccaggcaggacagatagagtgatcatctccattttatggatgaggaaattgatccccaagagttgaagtgacttgcccaaggacatggtgagtaaggagtctggacttcccgcaggtttgcttgactctgaactccaggttctgtccatggccctgagctgccattcccctgagctccacaccccacacccctcacccctccagaaggagctaagggcagattctcctcccttatcctccaagaagtcaggggcttcttgctctgtttgaaataaaaagcaactgcgtctgcgcaccagtggcagagacggactttgtacaagcatcggggtgaaatgaacattcttcaggcatgagatgttacctctccccatgtctgggttagggtccccgcttcatgctctcacaactcctgaattttggcaccataaccccatcacactgtactggattggctagcaggctggcttaccaatagcctagaatttccttgacacgtcaagaaaaatctccctggtgcccactggtcaagcatttagactgtccccacccacctgcgttctgcaacaagaccccctctcctgcaggtggcctgctccccctgtacctacccatcaggtgatgccagccaccaatgtgtcaggataaccacacgggctttcttggaggcagcagtttcagtgaggcatttttttggtgtgtttattatacaattttaacacctatattttaattttagaatagttttagatgtacagaaaagttgcaaatagagaattcccatacaccccttacccaagtttcttctattgttaacatcctatatcaccagagtacatttgtcatagctaaaaaacaaacattgggccaggcacagtggctcacacctgtaatcccagcactttgggaggtccaaggcgggagaattgcttgagcccaggagtttgagactagcctgggcaacagagtgagactctgtctctataaaaaatttaaaaattagctggatgtggtggcacatgcctgtaatttcagctactctggaggctgagacaggagaattacttgagcccaggagtttgaggctgcagtgagctatgatcgtgccactgctctccagcctgggcaacagagtgagacccttacttaaaaaaaaaaaaagtacactactcttaactaaactcaacacatgatttagatttcaccattatttttttaatgccacgagtaatacattcttgtatgagattcaacagtgtagtaaaagaaacagtaaaatatgactctcccttcattccttccccaaggcctctcctgccccaggaggaatccttctgcctcctctctgcaggtacaccttattcctgccactttcccccaggcagtgggtctcgagctggtggtcagcacatccgcctaccctcatgctcttgtgtcttgatgacagccccctcccctgctgcagtgaatcctctcttccctaatccctgcccatcctctgttctctcctccagccacacttcctctgggtagctttgaggaactcccagcctccaggggcccccctcttcagactgtctttgttttggtctccttgacccacaaacagttgggggtgatgacaatgctccctgcccctcctgtccctgtgaagctcctaggatgcagtaggtacatggtaatgggctgtgaatgaagtgaaccagggcttcaggaaaggcgcctggctgtaattggcagtgggtagtgccttccaacactgtggtggagcaggtaggaaggtgcggaagacttggtgtctgccctcagggccccccatcctggggaggacacacccacacatgctcgcctggctcctggatggctgtggccagcagagctcaggccaggcccaactatctgtgcccaaggctgggggtgggactggggtagagggtttctggacaaagcctctgccctgctctgcttgatgtggctttgctcttttctgccatggctaggactcaccccccagccagagaaggaggccgtattccagccttttctgcctcctccatacctccttcacagcaagtcctagagggcaactttgagctgttgcctcagcatccttcatcaaagcatcatctgtttctctcctagccccctggtgggcggctgccaccaccagcagcaccgagaacttatcccggccccctccccaccagtgccagctggtctcagcctgcactttgcccaaggtcctgggaatggggctggggttggaagggggccgatgcctggggtggcagcctgttcacctgaggagctggtcctcctcactcgccatgggtcagctcatccatccccttgcctcagtgcttgcctgcctctgccaatcccaggaaaaggagaagattcgggtgaagacaatggctgctaccaccagcaacgtctgtgcctctgattgccaagtctcctcctgccgcctcactgcctccccatggctgcctgggccttcaagtcagaaaggacagggcaggaaaaggactctggagacaggaggagtcccaaggtgttggggggtggtgatggagggaggctgctcagggaggaaaggatagtgggggtgagcctcaaggtgtgtgctcacgtgaccctgggaaggtgtgtctgtgtgtgtgtgtttacaggctgaggaggggccatgccccccagaccaccctgggcaggtctgcagcagggggccaaagccctgggggtcccaggtctttggctcctatggggcccaagcccaggagaggctgtggagctggacagccgggggtgggggattgcagcatcaggctggctgccgtggcatgagatgaaaggccaggagtggggctgttggcagactggcagacggacaggcggggccgggtggaggcgtggggtgggggaggggagataaccatctgctagagccgccaggtgtagacatggtggagtgtgggggatgcgggtggagggttagcccttgccatcaggggaaagagccagaagctggaagggctccctgtgaggtcatcttgtccagcctgatgcctttgggccctcggccccaaaccaagcaggccctgcttctggcacttggtgctcctccctggccccagcccccagcctgtcctccgcactgcacccatcccagagcagtgccccagaagtccaacccagagtcctctccgcacttaaaggcacagcgctccatagagagggtccgccaagcccggcctcctcttagtcactaactgctggggtagcccaggactgggttggtccctatcacctttcgtctccttgattccaaacctctcttactgtagttgtatgattatttgttggtgccttgcccctagccccaaacttggagagaaggttctagaaagcatggaaaaagcatgagcaatgaagcaagccgctcctaaacagtgtggggtccaggacaagagtcttgcttcctaaatctctctcttaacctcttgttgtctttctgtactcacacctaattctctagtccaggcttctaattttctcatccagaaattactttgacaattcccctaatatgccccccagcctcctcactgccctctgatctgctgcctcagtggtctgtctaacacgagagtctcaccatgtcacttctctgctcaacacccttcaaagcagtactgcttccagagccagcaagaggaatccctgccccaggcccctcatgacatggatatgacactgacgcttcctttgctggagaacccatgacagcctaggtcatgcaggctctggtaccaagggctgcggggtgcaacccacagcttcaaacttctgctctacacttctgtcactacagccatcgggcctcagtcacaggcttcttgctctaagtgtttgaaacaaagagcaactgcgtctgcgcgccattggtggagatggactttgtacaagcgccggagtgaaatgaaaaatgaatggggagcatcataacttcgggtttccagtctgccacataagaagcttggaagtcaccgctccatcctaattacaaaaaacagaagtaactgaaagaaaaaatacatatacttgttagattatttctttcaagtagcgtacatgcaatagattattaatattttaaaaacattcaagaataattaaatggattcttacataaactctccttgtagtgttgagcatccttgtccttatttcttctttgtgagtacaagaggtactcataaatcagtgtagcattcaaatgaatgcatgttgcagatgagaaacactttgctctactaaataattcatataattttttttgttttgatacggagtcttgctctgttgcccaggctggagtgcaatggtgcgatctcggctcactgcaacctctgcctcatgggttcaagtgattctcctgcctcagcctcccgagtagctgggattacaggtgcacgccaccatgccaggctaattttttgtatctttagtagagacggggtttctccatgttggccagactggtctcgaactcctgactttatgatccacctgccttggcctcccaaagtgctgggattacagaggtgagccatcgtgcccgaccttcatataattcttaatttgtacaaaggtaggtctagatggaacatgcatgaaacttgatagtaactgtacattggcaatttgatggatggtgaacgttgaaattacaaagcattatattttatcaaaatatataataatatttagatttacaaaattttaaataaaaaatttagtttcaggctggacgaggtggctcatgcctataattccagcactttgcgaggcagaggtgggaggattgcttgaagccaggagttggaaaccagcctgggcaacaaagcaaggcccctgtctctacaaaaaaaaaaaaaaaaaagccaggagtggtggtgtgcaactgtagccccagcttctcaggagaccaagtcagaaggatcgcttgagcccaggagcttgaggatgcagtgagctatcattgtgccactgccctccagcctgggcaacagagtgagacaaaaaaaaagtaaagaaagaaagaaattagattcaattaaataatcttaattttctacttaacattcatttgttataatttacattctgccttttattttaataaattagaatattttagtcacatatatatttaactgtataaaaaccgtggctttatgcaatttaaaaaattttgttgtccaggtgcggtggctcatgcctgtaaccccagcactttgagaggccgaggtgagcagatcacaaggtcaggagttcgaaaccagcctgactaacatggtgaaaccccgtctctactaaaaatataaaaattatctgggtgtggtggtgcatgcctgtaatcccagctactcaggaggctgaggcaggagaatcgcttgaacccaggagtcggaggttgcagtaagccaagatcatggcactgtactccagcctgggtaacagagcaagactctgtctcaaaaaaaaacaacaaaaaaaatttgttgttggtcaagtgcagtggctcacgcctataatcccagcactttaggaggccgaagcgagcggatcacttgaggtcaggagttcgagactagcctggccaacatggagaaaccccgtctctactaaaaatacaagaattagccaactgtggtggcgcgtgcctgtaaccccagctacttgggaggctgaggagaatcacttgaacccgggaggcggaggttgcggtgagccaagatcacgccactgcactccagcctgggtgacagagcaagactccgtctcaaaaaaaaaaaaaaaaattgttgttatgaaggcttattgtcaaagaaagtaggaagaatgtgtttagcgatgtttagctggatagtgaccctccacttgtactcttgtcctggaccccacactgtttaggggcggcttgcttcattgcccatttgctgctggaccccagagcatgacccacaaaggcttcctctgcctgagactccagggttccctgctgtcttcacacagccctggaccgtggggaggtggggaatcccagaacacacattttgctgtgcttttcccaggtctcagacgacctctccttccctagtcactgtatgaggggcaagtgccagctcatacttccagtctcagcccagatctgccctccccggctccagcaggcagatggctgcccctccagatgccccatgctatttgcaagttacctattaaaaatggttcttccacgtggattcagtgcaatgcccaaatccaagtgtgacaagaaagtctccttaaccaaaactgccaagaaaggcttggaattgaaacaaaacctgatagaagagctttggaaatgtgtggacacctacagtaccttttcatcttctctgtggccaacatgaggaacaacaggctgagggacatccagaacacctgaaagcacagctggatgttctttggcaaaaacaaggtgatgatggtggccctgggtcagagcccacctgatgagaacaaagataacctgcaccacgtcagcaaaaggttgaggggtgaagtgggtctcctgttcaccaaccgcacaaaggaggaagtgaatgaatggtttacgaaatacacagaaatggactacgcccgagctggtaacaaagcagctttcactgcaagcctggactcagggcccctggagcagttcccccactccatggagccacagctcacgcagctggccctgcccactgccctcaagagaggtgtggtgaccctgctgtccaactatgaggtgtgctgaccccagagcaggcttgtgtcccgaagctttttgggtatgagatggctgaattcaaggtgaccatcaaatacatgtgggattcacagtagggaagtttccagcagatgggagatgacttgccagagggcgcatccgagtctgcagaagagtcagactcagaagacaatgactgaaagggtcttaggactgaaggtctcctggaaccttctgagtctcactggaccatgcaggactgctgccacccctctagagagagcagctttttatttggctgtagacagggaacgtgctgggcaccgacttcctataaagaataaaactttgcaggatgtctccctggagacaaaaaaaaaaaaagttcttctgccacacgggaggtttgtggactgcctctttatggatcaggaccttttcttgagcaggaacttgggagctctgggagtagggagggggcagggcctctgtgtggggctcagagctcagtgctgggatgatggggttttgatatctctgaagtctgcagggcttgagcactgaagaaactcaaaattctagggaaaactagctgaggacttgggctttgcccaggggtgaagccacctgagaaggccccagagaaccaaggtctgagaggaggttggtgggaacccccattggcacccctgccagccgctatctctgagggccaaggtggtgagtggcagccaggggctcagtggggagggcagaaagtggagaggggcctcttgcagaaaatccaggctcagctggtggctctgaggtgggggaagaagggaaatggcaggatgttggaggcagccaaggttgggggtgggatggaagtggctgagctgaaaagaggcagggaccagcctaggaggccaacccatacctcactcacagcttctggctccctggagaaggatgttctttttggcagaagccagggcaggtggagtgtgaagggaaccctgcccttactttcctcagaggacacttcaaatgagtgggagtcccaatatttaccaagtacctgctgtgtgccaggcactgtgctgagggacttcacctcactttccctagagagcgatggcctacctgtcgggtggcatcagagaccacctaatccaattctcccatttgccggaggaggaagctgaggctcagacgtggggagtgacttgccctgaggtgagcgagaagaggaccctgggctggagtttgggtctcttgactccttgtcccgggtgcttccttaactgtccctgggccatccaggacaaggacatgctctgcccagagctggtggaaccacagcattggaccaccccaagctcccgacatggtagctggctctgtcctgatgccgccaccctctgtgtccctgccatggcccataatgcctggtgctggtggcaaggggactaggaggggctgattcagctgcaggctcttctttctcctgaaagaaagaaagggccctgcctcccacgggcccagctatctcctctctctggatccctgactccccaatccagccttcagctcccctaaggcccatgggatgctgtctcctttaacccaaagccaggaggagtctgagacaaccactgggactgggaagtgagaggctgggtcccctgtttcattctatttatttttttcatcatgattgtcatcatcgatgtcctcacaatgattgagaacattcgagggtccactctgggctctgattacaagcagggactattatttgctccattttccagctggaggaaatggggtcagagagggtgattgaagcccaaggtaccctattcaaaagaatcagaaaggggccgactccctggtccgctgggggtgtgcaaaggtgagcattcctgctctatctctatcccctctgagccacgaccatcagctcctcctccctctcccgggacacctgagaaaccggctgtgacacctaccctcccttcacgcccacccctcaaggctgtagtttggtcagccagaggaactctccgtctaggagctgggtgtgtgtgcagaccccatcagagagagagcctggggatcctcctctctgcctctatcccctctcccatcctgcccgtggctgtgcccaaaggcagctctcgatgtgctggggatggacgggaacactgctcacagggctgggcatgctggcacgcacctgtaatcccagctactcaggaggctgagatgggaaaatcacttgaggccaggagttcgagactagcctagggaacacagtgagatccttgtctcaaaatttttttttttttaacaaaaagaaagaaacaccgttgacagtccctgatcatttagcccacaaacatggacttgagctcctattgtgcccccacatggtcctgggcactgggcaggcaagtctggaatgtagactctgccctcctagagctcactgtccagggtaggtggagaagaaacccaccacctccattcaacctgcagacagtgaaccttgtgtgccaagcaccactgtaggcactaggggtccagatatgaacagaacagcccaaatctctgtcctcaaggagctcacatttgagaagagagagacagaatggaactaaaataaataagcaagtgacatagcctgtagaagggaatgtgtgctagggagaaagatagataatgcagggaggtgccagagagtgggagtgtgggagttgcgatcatatcacaaaattcactggtgctgtggacagtttgggggctgtagaagagcagagaagggacctctgacccctccctgagctgtgcttgctctcctgaagggagttaagaatggaaatggggaattcagagcacctttgtcccaggcccatggtccccaaacatcatggcaaagagcaggcacagtggggctttctgaaatgatctccgacactgtgtgcacccagaatgcaaggggacagactgcacacatctggacatgaatgtgcatatagatatgtaccatcgatagacacccagtgctatttcagcaccagtgctatttcaggcaccttgtccctaagaggtctcagatgcaaaacaacagctcgcatgaaggcagggaatgctgaaggcagaaccaaggggcaagaggttatagaaaacatcccgggaagcagcagaagttgaaccagcctagatggcctttactagattaagctctaagagctgcagctgcctgtaatgaaataaaatggcctagctcaggaggtagcgagttcttatcaccggaacctcaaaggaaggcttgacaacttgtgaaggggattcaaggactggattgcgggatagcacgaatgtcctcaataaggttacttgggtcctataaagttgggggagtcactaaaggactggagggaggaatggtggcgtgaagcacttggactttatcttagagggcagtagggagccatgttgggtgttggagcagcagagagacacatggaaggctgagtcttggaaagatgaatcagacagcactatgctggatcagactggggtaaggagggacatagaagggaggagaccaattactagactagccaaatgcatcaatgggggtgtgtgcatgtgaaaacacgtacaatgtgcatgcaagcagaaacctccaaagactagacaaccatcagttgtgacagcgttgaatggtctctagtcttgaagcaggagttgaactctgtgatatttcaagcccatttccaaagctttaggcacatgcaggagtgtctgtgggtgtatgtgcagacctgggtgtctatgagtatcgactgagttcactactccttcatcagcgaggtctgatgtggggagcaggagtgcacaccacagggtgacttggtgttggggtgactttgtgggcctctatttgggagtatagctgggaagcaaacattcaagatactcatgaccctgtgggattttgctgtcccaggtgtgacacacaggtgtgtgtgcgtgtgtgtgggtatgtgtgtgtaggagatgggattggggacgtccaagggctgagtgaggctttgtgagggaatttgttgttgcagcttggggtggaggagtggcctggcgtgtggctccctgtgacattctctctttttttcttttgagacaggctctcactctgttgcccaggctggagtgctgtagtgtgaacatggctcactgcagccttcacctcctgggtttaagcaatcctcccacctcagcctcctgaatggctaggaccacaggcatgctccaccacgttgggctcattttaaattatttttattttttgtagagacagggttttgttgtgttgcccaggctggtcttgaactcctgggctcaagcgatcttcccgcctcggcctcccaaagtgctgggattacaggcatgagccacagtgcccggcccctgtgaggttctgatttctgaccagtctggggacaccagttttgggggttgctgtgagcgagggcctttcccatacaccagctccctgagccatcctagccacccgtcatgatccttcttgtttccgtttcaacaagtgaagaagccgaggctcccagaaccttgcccagagtcacagtacaatgcaaagcatagccagaccccaggagtccaagcgcagagctcttgcctcagtggctacctctattacgtggggacgtgagtcaccagaacacggttggaggaacagtgctgcctttacctctaggcaaggcatctcctcccaggcacctatgcaccttcagaatcccgggcgaatccctgacctcaccctgacccacctccctccacctccaggctcctcagctcccctagacccctgctcctgcaaacccacatcccgcaacaacctcattggaaagccgggagcagctcgcagtcagcatccatgttttcaccccagctgggtgctgcagtcattgttctggcgaaggagggcgagggggcggctcgtgggcgttgcgacgccgggctgtctgctccactcggccgctggttattacctctcctcaggctcccattagtccgcctgccccagaggcccgcgcaggctccctgcacctcggcacctttgttccttaattatcactggggagctcgctcacctgcctgccactttctaagaagctgtctggctctctttgccgtcccgcacccccaggacctaagcctctacaccccctggggtgggggctggtgtctagcagcagcttgcccaaggattcagccggctccagagcctcaggtctgccccatcccagcccctcatagaagcccttcctcttcctctcttctgccttctccaagaaccctgcctggattaactttgtcttggatatcaggcctggaagggactttaaattgccatgtgggccacccgtgcggtggctcatgcttgtaatcccagcactttgggaggcctaggcgggaggatcacctgaggtcgggagttccagaccagcctggccaacatggcgaaaccccatctctactaaaaatacaaaaaagtagccaggtgtggtggcgggtgcctgtaatcccagctactcaggaggctgaggcaggagaatcgcttgaactcgggaggcggagtggttgcagtgagcgcagatcgcaccactgtactccagcctgggcaacagagcaagactctgtctcaaaaaaaaaaaagaaaaagaaaaaggccgggcgcggtggctcacgcctgtaatccctgcactttgggaggcctaggcgggcgggcagatcacaaggtcagcagatcgagaccatcctggctaacacagtgaaaccctgcctctactaaaaataccaaaaaaattggtcgggcatggtggcgggcgcctgtagtcccagctactcgggaggctgaggcaggagaatggcgtgaacccgggaggcagagcttgcagtgaactgagatagcgccactgcactccagcctggacgacagagtgagactccgtctcaaaaaaaaaaaaatgccatgtggttcgatagtggcaccctcatttgctacctggattgggccacctacagaaggtactcagtgaatattcagtgagaggatgatgaacctctgcagcctctatttgaatgtcttagttgataggcagctcactttctcccaaggcagccagcgccaccttggatggctgggacggttataaaaccactctcccctcatgtactgcccacatctctccccagcaccttctgatcttcatagccctgaatgtagactccaccttgctgtgttctgagtctgaggctcagtcctgtgtttcttactaggggctccttgatgtccgcacctcaggcgggaaacttcccagcgtggggctctgtccaggagcactcgcttctcctcccaggcttaaggattcagccttaccccagcccagctctagcacctgggtctccttctgtctcggacctctggctgctgttcctgcagaggaaggtgaaggggaggagacactggggtgagaggcctcgtgccaaacaagctctgacagccggcaagcaccagggagggagcctgctgcacacacaggccgaggctgccctgccgaggggaaggcctggtggagggcatctcccctccccagctagcctgctgccctgaccctcacacacctccctgcctcagggcactgtgggtttcagagcctcagaggctgagcttccagatgaaggagccaggagtgagctaacccaggtgggcaccaggggcaccctcctgtcaggacagtgcctgccctcagcgtctagggcacagcactcctctcccggggaggacctccaggggacgaaagtggctgtcagagtctacggctgcctctggacccagcctgttacccacggttatacagaggactgggacatgcaagacacaaagaaccctgtgtccacaaagcgtctcagagcctgaggaggctctcttcggaggccactccactcagcgtagccatctcctcccatgtctccgcccttagccattctcctctccagccttcatccaagtggagagtttccttttggtctccactttgcgctctttacatgtcttcgtcttccctcagactagaagctctgtgaggccaggaccctgcctctcctctcagactgcggggcggtcttgaggcccagatcctgcctctcacctcaggctaggggctctgtgagaacaggatcctgcctctcccctcagactgggggctctgtgagaccaggatcctgcctctcccctcagactggggggtctgtgaggccaggatcctgcctctcccctcagactgggggctctgtgaggccaggatcctccctctcccctcagactggggggtctgtgaggccaggatcctgcctctcccctcagactgggggctctgtgaggccaggatcctgcctctcccctcagattgggggctctatgaggccaggatcctgcctctcccctcagactggaggctccctgagagcagggtcatgtttcccctcagacgggcacacaggaaggttggagactatagtccatccacaccctgtctcggttctgagtgtctttcatcccaggagtgctatggggaggccaggaaggcgcctggcactcgctggagggcctctggacaaacaccagctgggggtggaggactcgggtcggcacctccagccaccagaccatgacctcagctgggccgccccaggctgccctccggatctgactcagaaccttcctggggctgctgctgggcgtccatccccagggtcagcccgaggaggccaccagattccacaggccccacccagttggaggccactgcccccagaccccactggggtcgccaggggctccatcagggttgaaggggagagcagagggcaaaggtcacctgccaggccccttgctccactacccccatcccttcccaccctcctcacagagtccctgacacagaggctggggacaaggggatccccaaaaggcaaacaaggcagttcttccatgataggagaccccctcaaggtagtggctaagtcacccccagaatctttctcattaggagaaaataaatgaaggcgactcctgtggtacgttccccagagcctgggtctagatttgcagcggagtctgagggcttgggggatggaggtcctggaggggcagggcgagaggtgcccctgcctgatctcagcccgcacgcgctcagctaaagggagctttaaaaacgtaaatcagggtgtgtcctctcctgcttccaacctgccaacagcctcctttctctctcaggataacaaggccctattccatcaggaccctgtccacctcagcctcatctctggcctttcccttcgtccattcctctctaggctactgattctcacacactccaggttcacccatcctcagggcttccccgccccaccccaccccaaagccgtagtcttgctctgtcgcccaggctggagtgcagtggcgagatctcggctcagtgcaacctccaccccctcggttcaagcaattctcctgcctcagcctcctgagtagctggggttacaggtgcccaccaccatgcccggctaatttttgtatttttagtagaggtggggtttcaccatgttggccaggctggtctcaaaactcctgacctcatgatcctcctgcctcggcctcccaaagtgctgggattacaggcatgagccaccacacccggccacctcagggcttttgtactcgtcattccttccacctagaatacttttccctacacttttccttattcttgttcttcaaaactcgagagacttcttcaagaggccttcctagatgaccccatctgaaacagtgccctgtgtttctccggatgcccctatcccttccctctctacaaccctggcctcattcttcctcccagcacttgtcactgattgaaatgggtttctttgaatcacctggttactgtctcccccgcccacggggatgtaagctccatgagggtgtggctgtatcctcatcctcagtgcctggcacaggctggcgtagtggttgctccagagacatctgttaaatgagtgccctttggagggagagaaacacacacagataccccagggactggtggggtgggtacgagcaaggacgggacagcagtccttacaggatgtagggaagggggctgtcaggcctcaaaggtaccacgggctgagggaggagtgggagggaggtgggagggggcagagggaagggaggctgccaggcagtactgtccttgaatgtccccaccccggtcagaaaacacaactctgggtgccagtggggctgaggaaggaggcaccacagacccattcttgggcgtccctggtctggaagggacaggaaaacagtgcttggaaagtcctcggggtcagacctgtctacccagctttgagcctgggtttctgaagccatgggcagttctgcttggcccactgtgtcaggctctgtgcgttccaaacccaacgcctcattcttcctgcagcttgccctggcttctctagcaccatcaacagactgctgctcctcccaggcaggcaggcccgaaagcccagagtcgcctctgcctacccccctcacttacccacggccccacagacccctccctgtgcagtgaccggggaccaggcttccccgtcatcctgggcctctccttcgtataaagcagctggaaagggaagcgtccgaggcagttttacctccatcggtccaagactcctccagcctctgaaacaaattctaccaaggggtcggtgggggtggagaagggaggaagggtcctgccaaattctgatccacatcctctgtaagggaaactaggttgtgttggaagtggagtctggagttagacagacttcaattatctcactttctacttactctgtgaccttggggaagttactcaatttctctgtttgtttctctgtctctaaaatgaagataaacagatatattttaccaggttgcttggagattatgtgggaaaacatataataagcacctagaaaaattctgaaatacagctgatgttaataaatgagaagctcatcccttccctttcaacctgtactcctgccccctgctcaagaacctgctgtggctccctgtttcataccatgtctgatctaaattcctctgcctggctctcaaggatctccagtgtgtggcctggccttttccatccagtcatcaccccgaaatcttcccacactccctctttactcctgtgtccccatgaccacggtcatgcctctgccatgccttctgtccacactgcccttcttgtcccctctgcctatcctacttgcaaaccaaggcccccttctcgaggaagccctccccaagccacacctcccttgcccattctctggctcctccgggagcctgctactcactcagcccagtgggacagccatgctgtccgagcagttggatattccatcgttacagatgttgcctgcccatccaggttggtagctgtttccaggtgggcaaagaaccaccccttggatctctctagaacttgccagtgttaaacatacagtgagtactcagtgaatatctgtcttttgatttattatgaagcaataaataaggcaaatcagtaagtggcaagcaggtgttggaagggattctagaaggggtgaaggggtgttgagcctctcccttgtgacagaaactggactcagcgcttcatgtgttatctcctcattcttaccagtgtgggaggtagtattaactccattttacagatggggagactgaggttcaaagagatgcggtgacttgcccagggccacatggctagaaattggcaggggcaggatttgatctgaggctgggggcggggtgtggtctggggaagagcatttcagagggggagcagcctgttcaaagagtccaaggggaaagccagggtgagtgtgtggagggagagagtgggcagatgcgctggaaggggtgagtggtacatgcgggaaggcactggtttgcccatttgaagaagaggggagaggactctggaactgcctctctgacaggctgaaggaaaatgcagccagatgcccctcctggtgagctgactaggactttagaattttcctgtcagaaaaagctgcagctaatttcctgagtccataccgggagctcaacctcctctccctaggccctctgtccctagaagagaaaagatggtggccgggcacggtggctcacgcctgtgatcccagcactttgggaggccgaggtgggctgatcacgagctcgggagatcgagaccatcctggctaacatgatgaaaccccatctctactaaaaatacaaaaaattagccgggcgtggtggcgggcgcctgtagtcccagctactcgggaggctgaggcaggggaatggcgtgaacctaggaggaggaggttgcagtgagccaagattgcgccactgcactccagcctgggagacagagtgagactccgtctcaaaaagaaaaaaaaagaaaagaaaagatggcatttgcattccctctctgcaaaggcaaggatgtcagagaggctgagagtgatgtcacctggtgacctcaggtttctcagcacccttcttccaaaaagcagcttttttggaaccacttgtccgagtgacttgcctcaagccttcatgtcatagaccctgctgctgtcgcctccagatgcggcccctgcaaggccttatgtacacccagctctcagcggggtgccagcctcaaattctcctgtttccagcacttggcacagagaccctcacagttccccttgaccccccctgaccaagccctccacgcaggcagccaggcccagctggaataacacggctccgctccctcctccctcccacgagtactggactatttacaactcaccagggccttcacacccatgagctcactggagccttccccacccaccctggaaacccaacagggcaaacaccattagctccattttgcagatggggaaactgaggctaggtgccccgcccagtgagttccccaaggcccagcctcctaacttcttagtttgaagctcttctcaattcctccaggagggtggcccaaacaccccaaattcaagtcggggagtttcaggcagacggaagggtaggatctgatgagtaggatctgtcacaggagctggaaggagcctctcgggcagtgagccaggacggcgggggtggagggaagtttttatggctccagccactggctgggtgacagcctggcaggggcttcttcagggtggacatgggagcggggggcaggagtgctggccagccaggcaagctggctgggagcacagttggggtgtctggctccccagagtagagtagggggaagggggcaaagccccagcctcagagctgcctcctgggcaaccagacatgggaaactataggctggctgcagctgcagagacactaggtagataccaaaggggacttccatccacagactctttgctcaggcagagttcctgtgcactgtgaaccaggtccagcccaagccctcgcttgccatctcacacaaggattatgccactgtggacttcccacctctcctcacctcctatatatctcccaagaatttgttccatcctgggtcctcctagtcacccacccaccaggaagtactctccctcctagtctgcaccaaagtccccgaagccctgccagaagccctctctaattcttcctcaggttctggacatgactcttttccaagcctaggaaaatatagtttgaatcctcttgattctttgtgtcagagtctgtgtatggggtagggggttaaagctaagagtctctcataaggctaagagtgcctggggaagaggactgcgtctcccctgtcaaactgtgcaagcctccttcctctagctgtacctccttctgctggggcaggctctgcccatagggggcgcgcaaacagtgttgttaagcccaggcatccttgctacttactgaaccacctgcagggatatggatctgggtgacctgtcaaatgcacctccagagctccagcctatgtttcaattggccttggctcagccttacttttcaactggactgatgggaggggagaggttttagataaggacagaggcccgtcttttggcgtaggaagctggaggctagacagtgacctctaaagaagtctccttgaccttccaagctcagggtgggtgagtgacttgaggtgctcacacaacccacagtggacccagatatcttccttggctctgttctgaatgttctgggctcctgggcagaggtcccaaccaagcaacccctatttccttccccaagtctttcggaaagactggtgagtcagctgcggccatgaactcatcctaggcagtaaaaataggaaaacaaacaggcttctcctccaggcagggggagtgggaagagggagggggagatgggttttttcccctgctgggggaaaagagttgccatcttttgaagtcctccagagtgaggccggcgtccttatggcccctagaaactcaaccacatcaaagtcacccaaggaaggtggtttaagagggatgctgggtcacacacacagtcacagtcacacacagtgacacagccgagtccctcagaggagcatacagtgacacacacaggagggtgcgacacccagctacgtacacaacatgcaaagccagtaacccaccaggcagttgcgtggatacagtcacacagaagagagcctagccagagtctcccaggcccacctggagacaatatcagagtcccatacagtcacatccatccacgacagctgtctccacgcagagctgcacctacatcatgcagacaacacacagctacacagactgccgcatccacacccccaactcccagccactctcagaaccagtttctgagagtcgcactcatggcagaggcaacgccgatttctgtgcacataatcacacacacaaccacacacacaaccacacagtcacatgcagccacaagcacatagctcctatacaatgcacagggccacacccaagccacaaggagtcacacacatgcagtctcggttacaacccaccacatacacatttacacatgtgtcacatggtcatggtcacaaacacgacatccacacgattactcaatcacccaaaccagttctgttcatggaacttctggggctgagactcaatggcaattgaccctggggtggggacgggggcataatgtgattcccagctgcctgcccaactccctctctcctcttggctgcacctccctggccatcctgcattctaggcatccactatttggtgttctccaggctctgctgagatcctacaccctttgccttgaagacggctgcgtccaacccccattttgcatcatccatttactcagtacaccatcttgctctgtgtgccaggtactgtgctaggtgctagtgaacaagagattattctaaatcagacaaaaaatttcccaccagtgtaatggctatttccaaacacacgcctgggtgaccctccacagatctagccccagatgcctacttgttcccactccccagccttggggtggccccacacaggaccaatacttcaatctcattttgttcagaggccagttccaagaggctgaattgttctcatgcaatcgatacaacctctaatggggggcatggggcatagactcaggaaaaacatccctgtgaacttggcctccccttctctgggtgggtgaatctcaagaggctgctggtttgaaaaaactctatgctagggtccagagagtggggcttttgtcctgttccggcgtgtccttatgggccagtcttatccccttttcttccctagtgttaacactaggggtgctgggccaaatcagtttctcaccattagtacttattattatgcaggtttccaggcccacccagggcttctttctttctttttttttggagggggggggtggtggagtctcactgtgtcacccaggctgcagtgcaatggcatgatctcggctccctgcaacctccacctcccaggttcaagcgattctccttcctcggccccctaagtagctgggactacaggcatgcgccaccacgcgcggctaagttttgtatttttagtagagacagggtttcaccatgttggttaggctggtctcgaactcctgacctagtgatctgtccacttcagcctcccaaagtgctgggattataggcatgagccactgctccctgctgagcttctttattttaaaagtaaatttaataaatattttatatatttgtaaaataattttatttattttttttttggtagagatgaggtctcacaatgttgcccacactggtctggaactcctggctttgagcgatcctcctgtctcagcctcccaaagtgctgggattacaagcataaactaccacacctggcccacccagaccttcttgatcccagaatttgagaacctctggttctgggcctctgaggtgctttccatctctaagaagggccatgaaactttgaggagcagccctgctggaggcccctcccagccccaggcacttggcactcaggagccactgccaccctccaggaggtgccacgtcatctttctggtttagaggcttgggctggttaagggcttgtagtcagagcaggtgatgaccaaatctgaacttttgggtcctgttcttggctgaggctaggcttccagggcagggtggggtacttgggactcctggtacctttgccagggcaaatgatgcccaggaaccaggagagtccctgaacccaagcccaggcctagagggcttatctaagcgggggcagggccaaaaaaaggaaaagtccatgtgagagtctcaagtaccgagggacttgaatgaggcctgtttatttctcactcagtttcctatgttgagtcaattggcttcctgggttctgcttagctcctttcctggtgcttatggaataggctcatatgtcagaactggagggacattagtgggtccctagcccatttcttttctttttttttagacggagtttcactcttgttgcccaggctggagtgcaatggtgcgatctcagctcaccgcaacctccgcctcccaggttcaagcgattctcctgcctcagcctctcgagtagctgggattacaggcatgtgccaccacgcccgtctaattttgtatttttagtagagacagggtttctccatgttggtcaggctggtctcgaactcccaacctcaggtgatctgcccacctcggcctctcaaagtgctgggattacaggcgtgagccacagcgcccagccccctagcccatttctttagtctatgtcacagcccctcaactacgtatatcatccaaaaagctgccttcttggctgtccttgtgctgggcaccctgctagtcacatagagtgcctcacagtcctcacagcaattttatggagtaggtggtattaactccaccttacagatgagaaaaatgagacccagaaattctgagccacctatgccaggtcctctagctagtaagcagcagaactagattcaaacctactgctccagggtccaggccctcagccccatctcacagcattccctgagatcccacagcaagcctctgcttgaacaccttcagcgagaggggctcacaaacacttactgaggacagatgataaacacacacatattggaggaagcaaagctcaatgggagatgaacttgcccccagaatgtcttattctaacagaggaaacaagatgtgaaatcaccactccgtttaagatagaaggaattggtacctaagatagaggtggagaatatgctacttttgaaagctctagttattaaaaatgtcttccttatattgagcataaatcaacattgcagacaagtcacacgtccccactgctggctttccatagggccaattgccttactgctctttcagtcttgactcttgtcattgtactactctgctgcagagattggggcttcgctctgaccactgccagaccccacaacccacatagcagagagactccctcacgtccatgcaacatccagtttctgaaagctctgtcctcctctcctccttcacccacccattcagagagagttgagctgctctggaaaaacccagagaattccagagtcgggaggctggggttccaatcccagctctgtcacttactggttgtgcaatgttgggcaaggccctgagctgctctgagcattggtttcttcatctgtgaaatggggccagcaatacttgccccacctgactgggtggtaaggattagctgagatcctgagtgtgaaagtattccatatgccaccgggaggactgaccttcacaagcgtccctgtgcttagaagctgagggtggcttcaggattagctggagaataaaggctgccctgagtgcctcagcatgcaaggcacagtgccaggtgctgtgaggatgaggagctaaggaactccgccctgcaggagttctgtatcctgggggtgacatctcccaccatcaccaaatccttggggacaaagctttttaatcaaattgggtgtggcacctcaccccacccccgcaagtggattgtgtgatggagattcacacatcccttgtgggtgagccaaaggaaccaacaagaggaaagggagttaatgtgtgtgaaatgtctgctacgcatggtcacttagagttatttactgaatcttcacaaccctgtgaggttgggcttattatgatgtccatttcacagatggggaaactgagacacagggaagttttatttgcccaagtcagtaggtgatgtaggtgggattagaattcagatctgggccagatgtgttggctcatgcctgtagtcccagcactttgggaagccaaggcaggaggatcacttgagcttaggagtttgagacgactgggcaacattctgagacccccatctttacaaaaaattttttaaaaattgctgggccaggtgcggtggctcacgtctgtaatcccagcactttgggaggccgaggcgggtggattacgagatcaggagttcaagaccagcctggccaagatggtgaaaccccgtctctactaaaaacataaaaattagccgggcatggtggcgggagcctgtaatcccagctacttgggaggctgaggcagagaattgcttgaacccgggaggcagaggctgcagggagccaagatcgcaccactgcactccagcctgggtgacaagagcgagactccatctcaaaaaaaaaaaaaaaaaattgctgggcatggtggcatgcgcctgtagtcccagctacttgggaggctgaggtgggaggattgctttagcttgggaggttgaggcagcagtgagctatgaccacaccactgcactccagcctgggcgcagagcaatacactcatatctattctttttttttttttttttttgagacggagtctcactctgtcacccaggctggagtgcagtggtgcgatctcagctcactgcaacctctgcctcccgggttcaagccattctcctgcctcagcctcctaagtagctgagattacaggcgtgcaccagcatgcccagctaatttttgtatttttagtagagacgaggtttcaccatgttggccaggctggtctcgaactcctgaccttaggtgatccacctgccttggcctcccaaagtgctgggattacaggtatgagccaccgtgcctggcctgtttattttattttttttcataattttaatatacacaaattgctaaatttgctattgggtgggaccagtctcccatggcaccctacacagactctgtatctagttaatgttttaaaaagagagcattgaagaagccagaagtggggtgcatggtctatcaccccacttgagaggtatggccttaggtctagagacaagagttcacttatttgctgaagtccttaaggactgagaagactagagatttctttcttgtaactggatacctgagggtcaacagtttctccaaactgagccccagattccagagttagctgcccattccctcagcccagcaccaaaccataaagtagcgcaaaatgcactgagtcagaggcctggattgaaaatcctgctctgtacacatgagtgaggttttccctagcaaggcactttaagacatgggcctcggtgtcttcatctgtaaaatggggcaaataaccacctacttcacaagttattatgagggcccactgtagttatagatgtccacgtgctttggggaaggccatatatattgtagggaaaatgtcatattccctaggcatttgcgcagactcctcctgtcccctgccccttgctgacttgccaggaggactcaaaatacatcattattttgatttagaaagtcctcagccccagccccaagtctttcctgcttgtgatcttctgggcttgagcttcatggtgattccaggagcgagttccccaagttggaggaaggcagctggggaggtggcattccaggcggcatgtcagcgagtgagtcagggctggggcggtcctcctcctcctccctggaggtgggagagggcctgcctaactagcttctggctcagggcccagatgaggttactctcatttgcatacatctgcatatatgtaaatttcacctgtgcacactggcaggactgggaaagacacttgtgcaggggcaaactagtcagtgtggctggctgcttgctggaacatctaacccaggatcttggtccatggttcattcccaccataaaatgcctgaatgtgtgaaccaggcacctgtctcctctggttgcccaggccggcaacttcacagtcatttttgcttctaccctctctggtacagttacctagcccagtagggtttgtctttgagccactcttctcatgcttctcttcctttccgttgcctttgccaccacccccttgaaccttcccttctcacttcatgcttgacctattgcaacagcctcctaactgggctctctctgccacctgactcatccctcccaacccaccctcgtacccaagatgcccctgggaagcttctccactcccatcctggtcttctccactgcccatgggccccatttgaagctcttggttggcgtttgagaccctccacagggtggagcctcctgactctcagtctcagctctttcctcactttcttgcctttcagccaagtggatgtgggccctgcacacaccttttatgtgccccagtctcctcatttgttttttttttttttttttttttttttttgagacagagtctcgctctgtcgcccaggctggagtgcagtggcgcgacctcggctcactgcaagctctgcctcccgggttcacgccattctcctgcctcagcctcccgagtagccgggaccacaggcgcccgccaccacgcccggctaattttttgtatttttagtagaggcggggtttcaccgcgttagccaggatggtctcgatctcctgacctcatgatccgcccgcctctgcctcccaaagtgctgggattacaggcgtgagccaccgcgcccggcccagtctcctcatttgtaaagtggggataagaataggattctcggccaggcgcagtggcttatgcctgtaatcccagcactttgggaggccaaggcgggcagatcacaaggtcaggagatcgagaccatcctggttaacacggtgaaaccccgtctctactaagaatacaaaaaaaaaattagccgggcatggtggcgggtgcctgtagtcccagctactcgggaggctgaggcaggagaatgacgtgaacccaggaggcggagcttgcagtgagctgagatcacaccactgcactccagcctgggtgacagagtaagactccatctcaaaaaaaaaaaaaaaaagaaaaagaacaggattctcgtggccaaggtatggtggctcacgcctgtaatcctagcactttgggaggccgaggcaggtggatcacttgagatcaggagttcgagaccagcctggtcaacatggtgaagccccatctgtactaaaaatacaaaattagccagaaatcacttgaacctggggcagaggtttcagtgagctgagatcgtgccactgcactccagcctgggcaacagagtgagactccgtctcaaaaaacaaacaaacaaacaaacaaaaaacccaacaacaacaacaacaacaaaaacaagagtaggattcttgattgagcataggagttagagaccagtctgggcaacatagtgagactttgtctgtacaaaaatttaaaaattagccaggcatggtggcacatgcctgtagtcccagctacttgggaggatgaggcaggatgatcacttgagcccacgaggttgaagctacagtgagtcgtgttcttgccactgcactccagccttggcaacagagtgagaccctatctacaaaaaaaaaaaaaaaaaaaaaaaaaaaaaaaaaaaaaaaaaaaaaaaaaggactctctttgcaggattgtatgaagatttctaagaaaatgcatgtggctgggcacaatggctcacacctgtaatcccagcactttgggaggccaaggcgggtgaatcacgaggtcaagagattgagaccatcctgggcgacatggtgaaacccaatctctactaaaaatacaaaaattagctgggcgtggtggcaggtgcctgtagtcccagctacttgtgaggctgaggcaggagaattgcttgaacccgggaggcagaggttgcagtgagccgagactgcgccacggcactccagcctggcaacagagcaagacctcatctaaaaagaaaaaaaaagaaagagagaaagaaagaaggaaggaaagaaagaaagagaaagaaagaaagaaagagcgagtatgtaaagtatgtctactacacaagcccacaatattagccagtattaatgttatcacttctcttactgacattctatagaagacattcctctcctggggtcccctcctcttctcagccatcttcagcccttcctctgcacttgctgaatggtgcttctccaggtaagacaaccccatggtagttaagagggctaagctggcctgggttccagttccagcttttaggcaagttatttgacatttctgtgcctcggtttccagtttcctcatctataaaatgaggatactattgatagagtatgtcttatattcttttttttttttttgagacggagtctcgctctgtttcccaggctggagtgcagtggcgtgatctcggctcactgcaagctctgcctcctgggtttacgccattctcctgcctcagtctcctgagtagctgggactacaggcacatgccaccatgcctggctaatttttgtatttttttttttttagtagagatggggtttcactatgttggccaggctggtctggaactcctgacctcttgatccacccgcctcggcctcccaaagtgctgggattacaggcgtgagctactgctcccagccagagtgtcttatattcttatatagagagaatgtaccacatacaattcttgtgatgattcaataaaataatccatgtaagggcttagcaaagtgcctggagcacagacaacacttaagtgtttgctgatattatcaatattattgtgttacccaaggcacaaggcctcaggtcaccactgctccccttctcccctaaaggccctgggacaggctctgcaaggtttctcagaggggtctccaagaatagagccttcatctggatcctcttgtctacacacccagagatctactaccctgccctccctctctttcctgtggaaagcaccagaggcagcagtgccccattggttgggagtgtggggctgagctccccttcctcactagttttggggctcatgccagaatttgggctacaaagagctgttttcccccaaggtccagcctggacaggtgagagtcagctcagagtctgggaggggtgtgcaggggaggggagaggcaaactgacttgagaaggtggaaagtcttcagggctcagttccccaaccagcttgcaccgccctcaccccatgaaactagtgcaaaccctccccacttctctgcccattttccttccccctcaccacgtcctccagccttttccaggcagcagctagtgaacttccagtgtgggatcattttctaaggagaattaatgagggtgattgacagccgagggtggaagccaggctggaggaggtgcgccatgcaccaccccctccgtaaaccgctgagagtgggtccacgaccctcctctcggccaaccactcccgccccgcccccatagctgagcaaggtgagggggaggtttgggggagagacagcggagggagggtgggactgagttacctttcacctttacctctgcctaccctccccccacaccaggcctggggacccaagagcccaacacaggggtacacagggaaagcctgagtttgagattttttgtagttgtgattatttttctcacattgaagggaaggggtatgggtatgtctgtgcgcccatgcggccactccactctcctcctcaaggcaatatttccctcgttctcccaagcccaaaccagcagaggtaaggctgtctcctcccaggctgagctgccctgatcaggattcagagaccagaccttttgttatgaaagaaaagcagtctggacttccaaagggtctggttcgggtggggtcactggtcaaaaagttaaaccaataaccccacccttgtagaccctccatcaactccagggggtccagagggcaggtgtgagtgagtgtgtgtgtgtgtgtgtgtgttgtggggggggtggttgtgtgtgtacgtgtggtggccgtgtgctgtgtttgttgtgtatgtgtgatgtggctgtgtggttgcctatggagtgtatgctgaggctattgggtggcagaagtatacgtctgtgcatctatgtgtttgtggtgtttttggtgtgtgtgtctgtgtgtgcgcgcgcgcgctctgtgttgtattgtgtgcgctagtgcacgcattgtcttcgatgttgccgctagaggaaccttccaactcccactactcccacctccggctttcaccctgcacccggcgatgaagacgtcggcgaaacgcctactttccatgcctaggtctgggaaggtctgaagatcccggcggagctgccttcgttcggggccgggcaaattcgttgcagccgggttggcctcagggcctctcgccggctcgctatgtttccccggggcgccctggcaggccagccggcggtctgtcagtccagctcctggtgcgggcgcctcgttttggtccaccgggtccggggctgggacaccgagggaaaacttcagagctccgggccaccgagcctggaagttacgcgtcccccagcccacgcgtccccaatcccggggtatttcctgctccctcatccagcgaagttcagcgtcgcgtgtctccccagcggcgcagcctgcctccaagacaccctcaaaaccgcctcattttttgttaaccgttttctctctctctctctctctgtctctctctctcttcctccgtccccccaccccgtgtcccaagaatttttcctagttttgtttttaacatgtttagtgtgtgcataaaacatcccagctaatctcaaatagacttttcctgagcagaggctgaaatttgcaagtaatgcaaagaagactccgggagagcgtcgccgatggtggagcgggagacgggcgtggggagccccactgcagtgctgggatcgaagtggtgctgaccccaagacctctcccctcctcctcccccgggagcttctccagggttatttgggaaatgagggggaactccaatccctgagaaagcgctcaggggcttgctgaggtgagcgcaaatggaagcacaaggccgggctggccgtgggctcagtaaccagtcggctgcccggcttgcgccagcactaaatgctcgatcagaaagagaaaaagaggcgcaataattccaaatttcaggaaaagtcaaatcggagaggggggacgcaggtctcttcagactgcccattctccgggcctcgctgaatgcgggggctctatccacagcgcgcggggccgagctcaggcaggctggggcgaagatctgattctttccttcccgccgccaaaccgaattaatcagtttcttcaacctgagttactaagaaagaaaggtccttccaaataaaactgaaaatcactgcgaatgacaatactatactacaagttcgttttggggccggtgggtgggatggaggagaaagggcacggataatcccggagggccgcggagtgaggaggactatggtcgcggtggaatctctgttccgctggcacatccgcgcaggtgcggctctgagtgctggctcggggttacagacctcggcatccggctgcaggggcagacagagacctcctctgctagggcgtgcggtaggcatcgtatggagcccagagactgccgagagcactgcgcactcaccaagtgttaggggtgcccgtgatagaccgccagggaaggggctggttcggagggaattcccgctaccgggaaggtcggaactcggggtgatcaaacaaggaatgcatctcacctccgtgggtgcttgtgctgcgcaaggaattattaccggagcggttgcgatggcctttgcccggcgacccaagaagagtaagcaaactaccgtccacccagcggatcaggtccaatccctgcgcctcggcccaatccctagagccccgcggcgccgtatcccctcccccccaactctggaccccgccgtctgtccccgcggcatcaccagggtgctggagttttccgagcaggccccttgcgctaagcgagaggatctgtgagggaaagttgggagagccacttctggcttttgtgaagatcccgggcctgaggtattggtagtgacaggagagagttctctttttttcttccttctttccatccctcctcctccccccacttcttctttttggttttctcatggttttggattttagtttttgcaatttgtcataaagcaaatgacaaaggcttggagttcttagtccagctcagttcttttatcccttctgggtaaaccagtctcagagaaggcaaatgactgatgcaaaatatcccaaccagcaacttcgtggctgaactggaccagaacccaagcctcaagagtctcaagccagctctccctctttaaaaatttttttgtaaaatatggaatgcttcataaatttgcatgtcatcctggtgcaagggccatgctaatcgtctctgtattggttcaactttttttcctaagcaagcatcctctctcccctctgatccaatacgagattactgtgcttcccagcccacatcctcaccacgtccacctttcctgaggttggtgagatgagactcctattggagaggatccctccctggggagcctgcttctgaggagaccccaggttatcccaagctggtgccccagccccacaccctctggaatatgggagaagggagccttgaagaaacaggtgatgatggaaggagatgtttcctcatttgtaaaatggggataatagtgcctggagtttgagcgtgtgtgtgtgtgtgtgtgtgtgtgtgtgtgtgtgtgtgtatgcacgcacaggacttggatgttgtgagtgcttgataaattccaaagggctgcagagtatgtcctgctgctgcataggggtgaagatcctctgagtccagagaagccctgagagcttagaacttaagacaagtatgcactggggatctcttggctttggaggatgcccaaagccaactgtggcagaaccctgccagaaaacccatgcctgcccttctttcctgggtctgacaagaaaggattctgtgcacatggttctaagagggaatgtctttccacttatcctgtcaactccagctcaaaagcacttcctttgggaaaccctccctcacagccaaccccacccaaaaaacattctcttcctttgatgcacaactttgatgccatccctggaaactctcctcagcactgctgtaaggctgcctccatccctgtagaggaaaatggtgatggtagaatgaaaggtttagaaggatatatatcctcacaggttcacagctccagctctaaggagatggtggcatggcgagaattaaggaagaaagggagaaaggtagtcccacatagaataagcatttctctactgagcaaaccctccacagcctgttggacgagaggggagtgggttctccagctgccctgcaaaagccccttcttcccggctccaaggcttcaagatgaagagctccaagccaggtgctagagtctctccttggaaaaactcacctctatctattccactggggagtctagtttgaaatagacttgctcttcctccttgcaggacacctgactgaacttcaaccacccctgcacacccatttgattgattttgtctaaggaggcttgggctccattccccagccagtgttttctcctattcttccaggctgctgcctcctcctcctcctcctcctcatcctcctccttcttttttcgacatagagtctcactcggtcagtcaggctggagtgaagtggcatgatctcaactcactgctgccttaacatccagggctcaagtgatcctcctgcctcagtctcctgagtagctgggactacgggcatacaccaccatgaccagctaatttttgtactttttgtagagatgagtctccctatgttgcccaggctgatctcaaactcctgagctcaaccgatctgcctgcctgggccaaatgctgggattaccggcctgagccaccttgcctgatctctctttcttatcaccatcctcttccatctcccagttctacgagggctaccttcactctgaacgctaacaatgagagcatgtgtgtgtgtacaaacatgaatatgcctgcccagttgcataaagtgggaacaggtgtttgggtatgctggggaatttgtgaagactggcagtttagggacacatctaacataaggcatcttagatgtgtgtggacaggtatttctcatagagcaggaacacaagtatacattttatatgcttggatcttctgtattttctagtaggtacaccagtgatttgacttgtatactcatgaatccatgtaagagacaagtactagatagtgtttttatttagggatagtgctaattcatctttaggtatgtagatgtatacacatcacagcctaaagtgtttgcagatttacaaatgaacctctctttttatagaggaatgctagtgtgaacatcagtgtaggtacctccatgttggtatatgtgagtatacatgttgtatttgaatggagtccctgtgtagttgtgtacacgtgtcaataaatgcttgtatacgtggacacgtgtccatcgaggccatggatactaatgtttagaagcaagtcctgaacacagcctggaaaatgcgccagggagactggcctgcagtatttcctgtgcccgcccaggagccatccaactggactcatctcccactcccagatttcgtccgggttcaagcaacacttcagccccctgcggcgccaggtaaggcggggcaccgcacaggctaaagcccagagggcggatcccttcttcagcctcgggggcctgcaaggagctgcggtgtcgcaaccaaaccagggcccctgccggaagcggaagccagcacgcagggcggtggggtgcagcggcggcggtctcggcgtgccaggcccagggcgccccgcgggggcgtgcgcgccacacgcgtgcggggcaggctgggcgccgggcggcaccctcccagccccggcgtctatttaccaacaaactgccggcgctcagcagcggcgcattccgacgcgctgactaagcggttggcgctggcggtctgcacttgactccccttcaggtccaccgcggctggaccagaatcgacgtgcagatccccgaaatcgggagactgcaaatgcagattccctgcgtctccgcagcccccgggcctctgcccaccacccagctccctgtctcttgggcatccagtctcgccacctctctagcatttctgccattataaccgaggttcctggactgcaccaatcgctctgcaaccccagcacctctcggaggagaccccgaggtagaccggcctggagcatgcgcaccgcccctctcccatttaccacttctctacagcgggctgtcccggggggcggggcccggctgcaagtctccgtgaggtcaccgcgggcggtagccaatccgggacgtctaagagggcggggcccccgtcgggtcccgggaaccgaacccgatggagaggagggggcccccatggatttagggggggaggggaaagtcatggggggcacccccccggaacccctttcccaggcgcgcgttctccgctgaaagaggctcagagagacactttctccgggatcttaagtgtgggggctgctggctggggggcccgtccggcccaacgccggaggcttggaaaagagagttggcagcgggagcggactacgtgccgggccatggcccttctgcccgggccctggccacaatgacctctttgccctgccccctccccggccgggacgcctccaaagctgtcttcccagacctcgcccctgtcccgtcggtagcggctgcctacccgcttggcttgtcccctacaaccgcagcctcccccaatttgtcctactccaggccgtatggccacctcctgtcttacccctacaccgagccagcgaaccccggagactcctacctgtcctgccagcaacccgcggcgctctctcagcccctctgcggacctgcagagcaccctcaggaactcgaggcaggtaagttcggccgtggaggctcttcccacctctggggttcggctcctgtgcgcccctaaacttctccctcgcctggttggacgcagctagcgggattcaaaccttccttggattccctgggatgtgggggtggggggagggcgaagggatggggcgggagacacggggggaggggcgggggagagttgatctaggtctcctttcaaaaccgacctggtttcgatttgcagttgtgtaaagacaggcgagagggcccccccaaccccccacctggagcagcggggctgtctgtacctactagtaacggaaaactgaagcaatccagatgtggggatgggggcctagcccctttgtcagaatcccccagcccccgtcctgtactcccttcctgccccattgtcgcccctctctgcgttagtcttgtctcagaaagcagtgatcaagccaaacactgaaaaacagatcaagtcctggtaggagggctgtagacatcgaggcttattctgggctctgtcctctcccttccctggccttacccgctctcctcagaccaggcctgaccttgactggaagctggcctggcagaatctgggagtaggacccttctatccattgttctgagaaggtagccaaaggctggtaggaaagtcgctcatctctccctgactacctcagccttccagccaaaggagccggccatcgctgtcatctccactctttggctttggggtaggttaggccacagttcccgttgcctggagcaactctgagctcctgagaaagtgctcactggaaggcctcaatgaagcggagaacctggcccgtctttgggatcctgggccttgcagctgagctgacatacaatgtgggtatggcattgcccacaatcccatctgcactggctccagcttagcctccaggtctctggactctctgcctccatctaattgctcaccccctcctcctgcaattgtctttggcagtctcttccaaggaggcacacccattaggtgacttcactggagtcagctcaggaccaagacatcttcctcccttctcctgtggctctgacatgctcacaaaccatcagagccagaagtgaccctaggatttagaagctcaacttctttgatgtatagatgggtaaagcatgtggccaggagcatcgattttagggagcttcctccaacccccccaaaattaactgccttctgtgacagaactgtggctgtctcctgggctgcggagtgtggctggagtgggcgcagttgcagggaggagtagttctagtttttcaaatgaatccctttgactgtcctttagtgtatgctaataggatatgtttgtgtgtgttatgtgtttggggactggggtgggaatatcatgaccttgtcctcaggggaattgctggcagtagggttggtgttgtcagtcttgtctgagatctaaggacaacagagtggagagttcattttctttaaggactttcccccatccagcgaaaaaccacacacacccagatttccttagaatacatttctagcatttctctgctggaactggtgggtttgggcgctctagagtggagggcatgtgatcgagagcttggggtcctccttttacttccactctatgtccactcctgccttgggaaaaggtttggctccaagtgagcggtgccaccaccccgttgagccgtagggagcagcgggcctggagggaggccttggggctccatgatcgcgacccgggcagatctcgtaacttgctggaactggggtagggaaaggcagctgtccgggaaggaacttggagggggtctgctgggagagttggggcgcggagggctatgcgaattcagcaaccgggtcggcctcagagactctgcgtccccgctcgaattgcgcagtccacgcagccagagaggcgcgggtgggctctgggctgccagcccagagctgccagcagtggggtcgaggcaggggaggcaggacaggcgcgggcgggagcggaaacccaacggtttttctgggaattggttgaggcagggtcgaggagggaggatctcagaagcccgcagcgcccgaggccacgggtgagggatgcgggggaggtgacggcagctggtgaccgcggctggccgagggcgggtacactgacgtgtggagggtgagcccgactaggggaagaaggtggggggacgcgggcggacagaagccgctctctctcggctcaggtcggctggacagacccgcagggaatgcggcgaacgctgccctaagcgcccgggcattgcggctgctccatccgccctactcctcccattgcctgggacctctgcagcgtccccgtagagccgcgcaggttagggtggctggcttggaagaacagaaacccctcggcccaaccctcccctgtccctcagcattctagggctgggctgtcccgcggccgagattcctggagagctaggcgggccagagctgaccagatcccccgcggcggcaccgcagcgcgatccaggagtggccccgccgggctacgctgcgcgctcttggaacccgggtcaccttccctgccgccggaaccgctctgtgcgcgctgcccaacgaaggaaggggctgccccacgcagacccggcttctgggggtccctggaaacccaggcggccacggtgtggcgggggagacatggtcacttttcctgcagggtgcgcctgagcagaggggcagcccgttacagtaggcgaggccagggcaaacccggggtcactatcagcgctgcgagactggtattcaaggtcctctcagccgggcctctcacccaccccgctggccgcagccggaggctgccacgcggacaccgtctcaagcctctgagcattgctctgagcctctgcctgcaatgtccttcctctgtcatctctaggcctcggctcagccctggacctagcctttctgccccgccctaccccaagctggcgccaccgcccgtggctgaactccgacctcccaccgcaggcgccgcggtaccctggctgtggccctcggcgctttcttcctagggtcacaggacccatacgagtgggagctccctgggagcagaactgcgtcttgtatcacctggcgcggtgaacgtgggggttgaaacgctccacgcggaaggtagagggcaggggccaagggggcgatcctggtggctgcgctttttgctatttgctgccgacggcatgcagacgagatgcaaataagcttatgaaactgtccgtcctaccccctcgctccctcctcgccccctacaccgtgttgtgctgcccaccagactcggagaagccgcggctgtccccggaaccctccgagcggcgccctcaggcccccgccaaaaagctccgcaagccgaggaccatctactccagcctgcagctgcagcacctaaaccagcgtttccagcacacgcagtacctggcgctgcccgagagggcccagctggcagcgcagctcggcctcacccagacccaggtggggccagtgtcgtccttccccatctctcaccttccctggttctctgggaactcatcccccagccccagctgtgaatgactgatggattggtgctgtggccctgttgtcacagttctccagggaatgttcatagctggctcttagtaagccttggggggaatgtgttgaaaggtgtgcatgtatgtgcgggtggggtggagtgggtcaggaagaggagggtaggtcagacagggagacatggatactagctcagaggcaggaactcagaaggctcctggggctgtgggggactgaagcaaatgttcccagcctagggaactgctggtctcccaggactgtgcctgcacctggatccctttcccttcctcgaaacttttcacacatatcttcctcctgatctttcattctttccccttttcttcccgaaggtaaagatctggtttcagaacaaacgctccaagtataagaagctcctgaagcagaattctggggggcaggaaggggacttccctgggaggaccttctctgtgtctccctgctccccacccctcccctccctctgggatctacccaaggcagggaccctgcccaccagtggctatggcaacagctttggagcctggtatcagcatcactcctcagatgtcctggcttcgcctcagatgatgtgaatctggggaagggcgggtcaggcccacagccttcctgcaaagcccaggacccaggcagtccacctgcaccccttctgggctgggaggaaaccagctccagatgggttttctctggaggacaagcagttagaggagaaaaaggaatggagcagagcctgtacccctaaccctaacagctaaatcaaggacctcagccttatataatcattgtccccaccactaccatggactggacaccttcactccagctggacaaagactctggagagagagccattggctggagttgagactgtccccagaacccttggtcttgccactcccccactccttcttccctctctccctttctcctctccctgctttcttgaaaaggactgaatcgccactacagcctgggtgcaaaatcagcaagaaacattgagtatttttttttctttgtatgcctttggccttgcacaacccatttgtgagcaaaagcagaagtggaccaccatcagctcccacccacccagcgatttttccttggaggtcagcccgttacccccataactgatttacctacttaccatactgggaggtagaagagatgcagagaaatgtggaatttgtggacctatgggtaatttatgctttcctcctaaaaaaaaaaaaaaagccctctttcccaccccctccccatctcccctttttgaatagataatggatccaattatccatataattcaataggtatttattgagaggctcccttctattccccatccctaatccctaacgaacccacgggcacacacttttggaaacctggtaaagtaacacttagggggaaatggggacaaactggctctctggattagtgcgggtatagacacccccaaataggtgggtaggcccattgattcagctccttgcagctgtctctgttcaaaggaactgtgcagatttagaacgaattggagcttgagcttcacaccaccagcttccagagattaaagtttgtacaaaacattgcattctggctgtgagatgtgtttgtttcctgacttcttatgggtagcggctggtcatgcatctcttctggcccatctgacttttctaccatggaattacaggtatcagaggcactggattctagatttgtcttggccactaactagctctgtgattctggctctggaatgttctaacaacgtccacagtttcatatgctcccatgtgaacccaggagatgctcatgcagggtctgagtgctccttcccaggagatgctctcctggcccagttcaggagggagccaggcaccttaccagcccccaggccccacctttagcccagggagaggccctgttcaccttgagagagggcacacccacggatccggtccagtcctacctggagaagtgtgctgcttgggggcaggatggcctcagctcaccttggggaaggaggaggggcaggtctgagaaggaaaacaccaaaaagaactggaattctcttccatccaacaaacatttggagaccctgtgctctgctagatcctagggataccatggtgactgaagcaaacaaatgaccagacgctggtgtggtgagttccaggcaaaggaaaacacagatggtggcgtgggtattgtcaagggcctccaatccagcctgggccagaggggtcagtgctgggcgagaagggcgggcggcctggggagcagcaggacctgacagactcctggccaccacacctcactggactacatagcaccacccctgctcccaccaggatcagcaggataaggaacgccttgggagaggagctgaggacaagggtggcagaataattcagcgaatccagcccagcatggcctgaggggctgggggaggggcctccaaatccaggcaaaaagcttccaagttgagcttccctctgactgcctagacctgttcccagacactgcaaactcggtgcctgtcccagtctgaaaagcccactcagacacttccagccaaccgctgcaggccagagagaagcccaaattggagtcatgtgtagggcagaggggtatgaaatcccccagctcctgacgcctacagtcagttcctcctcagcccctgttcctcaccctgtgttgggtcagtgaccacccctattccacaaaacactcccagagaattctcttggggatggcacatggcatgggtagaccaaagccaagatccaggagtggtgaggaatgggagtgccaggaggataaatatcttcctcttcctacaatgccttcccctgctccaagccccaggctccactggctctctgtcaccccaggcccagttctctcctcttggtctcctctgaggccacaggccctccaggcagctgttcccgcccactgcaggttgcacactcctctttctacagacccaagataagatctaccgccccatctaggaaagcctccaaaggcgagattaattggacagcccaacacaagtcacattgttaaaacaacagcccaggttgtaaagttaagtagcacaaggagtgtaattactctctcagctagaggccctgagctgacagcatccacccccctctggccccctctccttctatccatccttttcaggggaaatgggaacctcttttccatttgggagctggcccagtttccctgagctcctgggcagtgatgggcctggagctcccgggcagtgatgggcctggagctcccagtggaggaggtgcccggttcccttccctcaggccatcagggctgtagaaggagaaccccatggttcctttccctgaggaagccccactgggaaaattgggtcagtaagggagggggaccaagactgggtggtgaagaacaggggctttaagctataaagagtcccggctctgtcatcttctagcagtgtgacttttggtgagttacttaacctctctctgagccttgctttttcccatcccccacccccacccaagatgagaatactaataggacttgctttgcagagtgattgtgatgacaaaatgagatagtgcttgtaacacgcttgacatggtgcctggaacatagtaagcacttaataaatggcatttacgactgctgttattatcaggggaagaagaggaggggttacagtgagggggaattcttactgccatccattcaccttctgcccctgggagaactgcctcctaaggaggcagacgaggaatgaggctggagaactcaaaacatccctggtcaccaccatccgagagctggatacaggcaaggtcccaaatgcagaagacgcagcacagtgcatctgaagtcagctgaaactggaagacgggaaagtgtgttcagagaacgtccagggcactacaagggtctcagctacagggaagctgacttgggcttccccacctttctgggtcactcaaccttccctctccccgtatactattttaggtcatgcctccatgttttcccccaacaaaatgagatttaattaattcaattaaagcaattttgggagcagctcctgaaggctttcaatgtgagataattacaagtaatttgctgccgtgaagaggaaaagggcacatggggtctgaggggaagggaggtagccccctcctcaccaaatacacacagatcttgagggattccacactgcaatcttaactgccctcccactggccaaattacttgcaggtgggaagagggagaatgtggtggtgatggttgagggggaagacacccagtgacaggctgcccctcctccacccccaaatctgaggtgggggtggggagctggttgttccccgacaaaatgtctgcaatgccatagcagctgattactcagctccaaacctcatttgagtttggatgcctggacttgcctctgggattgtatccagagagtcaatggaatgttatcccagtagctgaggcctgtgtagacgggggctttggagatcaaggacctccccagaatttataagggatatgggtagagaaaggaaaagtctttagaaggtggacagtgatttcctgcttccaccaaggagctgacgggacactcatttctctcctccctgctcgaagtctgtctagtttctgcctggtgtctaatctcaattcctcccattatagtgatggcaaagctcctctcagttgaatgcacagaggcttcttccttccaaaaggcatcctacaggtgtttcccctcccctctgcccctgggataaccctttccttcccaggcctcatttggccaggaggaggcaggagggggacatgatggagctgagaggtagatgctgggaggcaggggtttaaaacaaggtgtggggatggacttcagggctctgcaaagaccctctcaagcccgcccatgaaggagctggctttcaagagcctagggttccccttgacctgggagccccgttccaggaggtgagtaatgttttaacaatgatggttgaaaagaaaaagtcaccgaccccatagtgtttctctttcatatctccccctctcatttcaaggtggggtaaagaggaagagttccgtcagctcttgtttctcctcacctcaccccaccccacctcgtgcccctgcccctactctgagcagcatggctgttggacctggggagccaggagaaattctatcagtgagtccttgggtgactgctctctctccttccaagatgaaaacacttcgagagagacaagcggcctcctcaccacgcctccacttccccatttcctggcctgtgcagattgcttaaaaagggggaatagggctgggcgcggtggctcatgcctgtaatcccagcgctctgggaggccgaggtgggcggatcatgaggtcaagagctggagaccgtcctggccaacatggtgaaaccctgtctctgcaaaaatacaaaaattagccaggcatggtcgcgggcacctgtagtcccagctactagggagactaaggcaggagaatcacttgaacccaggaggcagaggttacagtgagccgagattgcgccactgcactccagcctggtgacagagccagactccgtctcaaaaaaaaaaaaaaaaaattggtggtgggggtggaaataaaaggcccttctactcctaacctcacaatacaaaggccccaaagaaatgcttggagacaagcaggcccagggagctaggcacacagacaccgcatgtgcacacatgaacccacagaagacacgcacacaggcaggcggacacacacaatggggtgcagggagtgggcagagccacatgtagacacatgtgtacatgaagcattcccatggttgtacatggacataacacagagagatgccctcgcagcttatatactcacagagagaagcacaacacagcgaagcaccaaaagggagatgcccggcgacttgaccgtaggcagaaacagacatgcatgtccagaaatatacagactagcttccttgtgtgcaagcagcacatgtgtgtaggcgggggggggcagtctctttttctctacctctttcttctcctgccaccttccctttctctctccctttcccagctctccatctattttctgggaacatttctctggtgagtggttgaggagagaggctgaacagccacagaaactcgataattttattctgacttgattgtttgtgttccctgaagctttgcctacttcttttcctaagctctagcaagaaaagcttctgtccccagcccttcctggtacaactcatggctcccagacatgtccttggagtccagctctgccacgggaacccagaggctatttaagggggcttaagtggcctttccttcagaagtctccactgatccctcttccccacttcccgacattgactccaatccagggaagcaggagggggcttgggatcacaaagtggtgaggaaggcacagctctgcgaaccaaagatctgtatctgatactacttgctgtgtgaccttgggcaagttacataccctctctgaaactcagataatttctcttgctaagttctgggtgcagggaccagagtgggctaatgtgtgtctaccaccactctccactctagtctggggctttgtaaaggcagaccctgcctctaccatcagactgagctcccctgtgcctcagatgggatgcatcctacagctggctcttcccagccccccagtttgatgatgctgaggtactcagccccactggcaccctagggggcatgtctggccagctcaggaaggggaaaggagtcggccccaagcttcctccaaacatcaagctttctgattcagtgtctcacagtgccaggccttcagcctctctgacccaaaactggagagatgacttcatttccaggggagggtgccactctctgtggagggcatgtggaagagattcctctcagctctgtatgaaccattcctttcagagtttagttgcttggggttaagcctgaagaagatcattttgccgctgcatgagacttcactcaggtctgtggcccccattctctcaccctccccatctccagctgatgtaacgtagagcccacatcatgaggttggagcacccacctggatcatcccactttgatcacgaggttccctgggcatctcctccacctacaagcccaccccatgattatcttctctgtcctggtttgcaccttaacctgatccattaagacttgcactctttcttcagactgggggttgccagagagcgcttcatgggcctcccctcttggactggggactcctgggcaccctggcttcttcctctgcctgctcacccctccctcaaccctgatgctcccactctctttggggtggagaggctcagcacatggggttgggtagaggcctaagaggggatggggccacgtggtacttgccaggccacgccctttccactgcctgccttgcctgccagagagccacaagaccactcctctcgggctggacccaggagctgctttctctgtctctgcaagctcgggcctgctgcaaactcctcctcccagccctggagccgccgggaattctttgctccaacagatcctgggggaagccagactgcaggaggctcctgacatgcctctacccagctcctgtcacattccccaagcccagggggatcagctggatccaccaatgcaggcttcttccaccccttgtgacccaggtctttgccttaccgcctcaaatcctcctacccacctttctaaaccgtgaattctgtcttgggactcacctctgactttggatccctcccactcccagccccttggcagccctacccgagcaataattgttatccccccagctcccttggaataacatttacctccttctccatacagcctttataaagtcttcatggatttgcactctgagatgcaggcactcagtcgagaggccttgggcaagtcacttcacatctctgggtctttatttcttcacctatgcagtagggccaatgatcaaatgatgcctccaaaggtcatggagacaaggagagtgcacccctagtaagttgtgaaaaataccaggtatgctaggagatatggtggcttattccttcaccctggctagaccaacttggtgctggaagtgtctctctttccatcccctaacttcttctctgacccaccagttcaccatataatggagaatagtatagttctacccccaggaacacaaaataacaaagagccagattcctgattcaagtccaactcgatgaccttgggcaagtttcttaacctctgtgtaccgcacctttcttacctggaaaatgaagatgagagcatgtgcttcacagagttttttgtgggaactatatgagttgaaacccaaaagtcagccaggcgcggtggctcacgtctgtaatcccagcactttgggaggccgaggcaggcagatcacttgaggtcaggaattcaagaccagcctggccaacatggtgaaaccccatctctactaaaaatacaaaaaaaattagccgggtgtggtggtgcatgcctgtaatcccagctactcgggttgctcaggcaggagaatcgcttgaacccaggaggcagaggttgcagtgagccgagatcacgccactgcactccagcctgggtgacagagcaagactacatctcaaaaaaaaaaaaaaaagaaaaagtcacaataatacagtaagcattcagcaaggattcataattattagtatctctgactgacaagcaaggaaaacactctctgtccacgaggaatcttgcccaagtaccagttcctctattgctcttctctgcttggaagtctctattcccaggtgtcaggatggccaagtggtctaaggaagtctctattcccaccaagcatctttttgggttggagccacctgtcagtaaagccctggtgtgggctatcttcttcagccaccctgtagtgtgggtaatgggctggacagaagctgctttgtgactagtggaggaggttgtgcaggagactggctaaagtgtgaggatgtctgactgcgctccctgggcagccctctgaacacctcaggtgggaagacaactgaagagggaaggccatacagtgcctgcctcagtcagagctaatgcagaggcagacaatgcccctgacttcttcattcgtgaaagattgccccctcctgtaaccccagattccctccaactacgcaaaaaagcagagataaaactgtctccggctgggcacggtggctcacgcctgtaatcccagcactttgggaggccaaggcgggtgggtcacttgaggtcaggagttcaagaccagcctggccaacatggtgaaaccccatctctactaaaaatacaaaaattagccgggtgtggtggcaggtgcctgtaatcccagctacttgggaggctgaggcaggagaatcgcttgaacctgggaggcagaggttgtggtgagccgagattgcgccactgcactccagcctgggcgacagaatgagactccgtctcaaaaaaagaaaaaacaacaataacaacaaaaatatctctttttactgatatttgattgcatgcttagaaaactcaagaaactccagaggaaaaaatcttccagaattaagagaattttggcatggtggctagatatgagataaatataagacatcagtaactgttctttagtatagcaataaataaggaaaaatattccttttaaaatggaaatgcaaaacaaaatctgtaagcatatagacgtggagaccagatatttagctgatcagtaactgagatatataaacccctgtcatcatcccttctgctggttctaggcacatgatggtttcctgggtgatcatccttctattatctgagtcatgagatcaagaaagcacttttccagtagagggaggaattttgtaggtgatctcccctgacagagaagaaagggtcaactttggactcatggagggtacatagaactccctgggccaactgaggaggacgctgaggagtgtcctacctgcctatggctgatttaatctaaaacggacagtacaggccggcgcggtggctcacacctgtaatcccagcactttgggaggctgaggtgggcagatcacatgaggtcaggagttcaagaccagtctagccaacatggtgaaaccccacctctactaaaaatacaaaaattagccaggcatggtggtgggtgcctgtaatcccagctactcgggaagctgaggcatgagaatcccttgaaccccggaggcggaggttgcagtgaaccaagattgcacgactgcactctagcccaggtgacaagagtgaaactccatctccaaaaaacaaaacaaaacaaacagaaacctgacagtacagtttgttgagctcccatcattgtgttaagccctttatatgtgttatctcatttaatttcctcagctgccctgcaaaagagatttggttagctccattatattgatgagggaaagtccggctcagagaccacaagcgactgacctgaggttacacagtctcattgatctcaccaacaaaatgggataataatgacactgatcttggcaggtagctgtgaggatgaaatgagacagtgcctgtggaagctcctggcatagggcttagcacacagtaggtcttccgttagcaccatccctgcccagatcttgggaggaactctctgctcttctgcttgccttcctttccagccccaattctgctccctctggccttctgacttctttagttgcccaccctcccctggctgaaggcacatcatcctcccccactcaccatcagtggttcctgagctcagggcaggcctaactgacctagggagtgggtgtgggacagtgccacacacattgcatgacgtggccaggcaccctcagtgtgcagggaagcacacgctgctgccaggtgcgaggtgaactgcctggggtgggggatacccctcccctgctccagctaatcctccagggtgtggagtctctgttccctgctgactcagcagacacttccaatcctgctctgatttgccccaggagacaacccaggaatttgggccttgaggccccacccactgttcccatccccaggtttgtctccttccaaggtgcctatcctggctgcctgacccctaagcccctcctctgactcctcatcttgggcagaggcagccaggagactcctggcccttcctcaatgcttcctgggcctctgagcttcccaggacgctcctggagcttaacaggcctggtccatactctctcccacccccaaaaagtctgctagattccccaacaaaacaggccaattgaagaaaagcattcaggggtgtcagatcactgggaccacctgcttgtgatccagaggcctctcttggttctgcaagggtttgagagcccactcagcagtgcctgtccaggtgtagcctcgtgtagggagaggagccccagcactaagaacaatcacctgctgtgtgaccttgggcaagtcacacaacctctctgggcctgcttcctgatgattagattagaatgcctagagagagtgcgatcactgtcaactcctgcagttgctcaggagaagcaattggatgctgggctttcctgttgtcatctcatttaacccccatcagcctggggagggacagttatcatgtccccctcagcttcacagcccctcccctgatgctgagagagggactaggagaggggtcccaagatcaatcatttcatgtcattattcattcattatgtgttcactgagcatcctgctattccagcctgtgctaggcatgaggtgggggtggggggtgtccaggagaacatgtcccagtccctgacttcattcctgatgcccccagttcagattcttccctagttttgcccctagggaccttggtataaaaaggcatttccaggtcccttgccttccagcccagcaaccctccccagggggaacaaaaatactccacgtggttcatgcccatgctatgagctggggacaaagcaataaggaaggcgccatgcaggctctgcctccacagagctaggatggagcctgcagagagtcactgagttagtggtgacaagcatagcccagtgacaaaagagaaaggcaagggctggagacccatgttggagatgggggaaggcttccctgaggaagtggccttaagggcttctggtggggaggttgctgggcccctttgaagagactgaggctgcccttccctgacttcctggccccagccttctcctgcaatcccccaacctgctccctctgcccccagccccactagtgccccatcaacatcatcctcctgcccacctggggcctcggaaactcatctccaagcactttttggcttggaagtctccaagtctcaggctgttgggtagttggtaaacagcttattaaggtgattaacactgcaattaaagctggaaaaacagaggccagggtgctggctgcttccccttctccttccccctccattctccccttcccttccaatcccctccaggcttagttgatggaattcagccaacgtagccacctagagccctcatctagggtcttggaagtcaggggctgggaggctgagggtcaagggtctttgccagctgtctagaatctttaccactttgctcacattaccccagtggctctgctggactagataataagcggtaggggtagtgtggtcctgaagggtgtggcatatggaggctgaagtgggtggggtctctgagatcccctagtatctgggaccccctccagggaggggtccttagggaaagagagatcatccttctcatccacttccccaagtgagaaaagcagaagctatctcctcccaaaagaggcgcaggagcttccgtaccccaagctcaaggtgctggagcatcttccagcaaacctgagggtctgggaatggcaagacccttacccttctcttagcctgacacccagggaaggatgtggggaccctctgagtctgcggtttccctccctgcactggccccagcatgattcataagacagctgcgatcaggctccacaagcctcactcctcttgaccccatgaagtcccagaggggggatatgttcccagagccgccccccacccatctttgcctatcatgcttccatcttcttacaaggcttccttcaaatgcctcctcctctatgcaatctttccaggcttccctcccactcaccaccaactgccttgccctttcctctgacagtccatcctgtcctccctggactatgtcaggtgtgcccagcttcaggcccctcccgagtgggtctgcttctggccctggagctcttagcacagggtctgtgccttccttttccaggctttggtcatcagtcagaccacctcctggaacagtgcctgagatatagcaggtgctcaataaataattggttgatttattccttttatgagtgcacctagagatgcatgggtcagccaatgtagcaagtgcagccagtgggctgggtctgaactgggggtgtggagtgatggatggggcaggaggcaggctggggagcaagccccatccccctggtcaccattagcagccgccgcttccattaactgagtagtactcaccatctgctggggaccttgttaaatattttactcacattatctcatttaatcctctcaacaaccctgctaggtaggtagcattatccctacactacagatgaggaaactgaggcttagaaaggttaagtgacttgcccaaggtcacacaaccaataaagtactggaggcaggattcaaatccaggtcagctgactccagcatgcacattcctgactgcaacattaagctttcccaggaccagccctcccctctccatttcgcctcccagggaagaacccagggaggagggctggccagctggggtgggtggggctgtggtggctccagctttcagacactctgcactgggatgcccagagattctgaaaagcccactaagagcacccattctccagacctagggttcaaattctagcattggcaagtatgagttatgtgacctcagcagagactaaatttcttttgcctccgttttcccacctgataaatgggcactataccacctacctcccaagctgttgtgaaggtcacatgcaaagtgcttggcacggagtaggagtttagcgaatgccagctgtgtctaagttttggagaacagtgaccctcagggcaggctggggttccctagcccgccctgcttcttccccgcctcacaaaggttgtcacgaggccatgggtgtagtcaagaagcacctggtagaagatgggctcagcaggcttaccctggtaccctgccagggcctccacccccagcccctgtgcttgtggggggcccccatcagggctgatgaagagggtgacctgcctggcctagaggagaggagaggaggaaggggaggtcaggggtggggctgacccccacaggaggtcacctgggcagttaatccagcctgacagagccgggatgagcagggaggaattagggagcttacaacatcctttcatcccagagccgcggactgcccgccctgcctccctccttccttcctctctctctgccctttccttctctctccctccctttgctggcagcccagccctaataaaatgcagtgtctccagcaagtctgcccggctgccgcctcgctgctcccgcctgcacgcagccctcaaaccaaactactcagctcagccctgcctggcagctgccaccttaacccttgccagcccggctggcatccgtgggctggaggccctcctcccttccgcctcccgtgggcatgggggagggaagagcctaccttctgagagggaggggactggatgagggctgggtctccccagctctggagccctgctggaggaccccccatctgtgtggctgtgagcgtccaacaaatcccttctgtgagcttgagacccgctccttctgcctcatccttagtcggctgtgtgcctcaaaacagccccagaggtcaacagggtggggatcgttatccctatttgacagatggggaaactgagggccttgacacagaggttcctatctaagctgggtcacctcagctgttgggtagtgttttcttctttctctttctctcgttctttccttttttttttttttcagggtcttgctctgtcgcccaggctggagtgcagtggtgtgatcacttctcactgtagcctcaacctctcatgcttaagcaatcctcccacctccgcctcctgagtagctggaactacaggtgcatgccaccatacccggctaatttttgtgttttttgtagagacggggtttcaccttgttgcccaggctagtctcgagctcctaggccgaaatgacctgcccaccttggcctatcaaagggctaggattataggcgtgagccaccatgcgtggccatgctactgattttctatctgactttttccattacagggagctgctctgcttctgtgtgtgtgtgtgtgtgtgtgtgtgtgtgtgtgtgtgtgtgtgtgtgtgtctgatgctagggtgacttgagtgatgtgtggctgtgcacctgtgttggcagcccgcatctcttggagtattatggctttggctttgtacctcgtgtgatgccaacatgtctcaggtgtgtgtttgcgtctgtggatgtgtctgcagatgacaggtttgcctcaagtgggagtccatgtgtgtgtgacgatggggagatgtcattgtgtgtcttgatgcatgcatgtgagagagaggtagcttcacaagcgtgtgcatgcattcacgctgtctcccatctgtgccaagatgtgtcactctcacacacctccgttcattctgccacctccagctctccgtctccaaagccttggagttgggcacctagaagaggagggtggcggcagggaaaaggctctgagtcagggcctgagccctccttgagaattaaacacagacccctcccccatcaccaggcctggatcacagtgctaggtccctccccactgagggagcagtcgtgtccccctgactgaggccccaccctcaccccaagctgaaagggacagacaggagggtgaggggccaggagtgcctgggcatggaggcagggggttacacacatgtgcaagcatgtctgcatgtgagctccagatcaaagaccagccctgaggtgacccggcggcggtgcagagggagctgtctgattctgagcaccaagctgccaagcagtggagtcagggaagctgctgctgggagcctcccccaaagacctgcccagattggggacagccatggtttcaggagcacctgccaccaggggccaggcccagcccagcaccttagtagtggtttcctaggggccccgtctccctcagagcgcagaagtgcctcctcactggacaccttccccaactctcagaccctccccacaagagctgccaccagcctccagttcaaagagctcagtggttattttcgtcttttttattaacattatatataaagatgagtccagtaagaaagcagaaatgagaaggctgggagggggtgggagatggctttgcttcttcccccccgggtgggactcttggagacctaccacgtctctcttggcccctgcacctcccacaaaacccaaatccagccggagcccacatctctcagcttgaaacacacagggagatccgtccaggaggaacatggccacataaataggaaaccgcagcagggaggaggctgcttctctctgttgctcttaaaaaaaaaaaacttactatatatttatatatatagctacagtcttctacctctccttttttttttttttcaatgttttactgcatcaggggtgggggaaagttagctttggtgggatgtctgggtcagggaggggcagtgccaccagccctccaggcagttaccccttactcccaaaggcacaagttctaactctcccctcctctcccatacacctcacccgacattctccagctcggagcaatctgtttccaaggccaccggaaaggaggtgtttgggggtttgtcttgcctggtatgtctctttggagatttggggtttggcaccaaaactgccaacttactggaggagtagagaaggtgaggtgggggcagggacagaacagaggcacccttgcaaggggagacttggccctatctgtgaacaatgccctttgttttcctatttttcaacagcttttaaaaccaaagttgtgcaaagtcctggacatggaagaaataagtccataggaaaaacgtctgagacccacccctcctctcggaacggaggagaggggagagagatggctcctttagttctttcctctaaagccacaaatattaaaagattccctcacttagggggttttctttggtttcaccctcaaatcttaaatgagggctagaagtgcagggcggtgaccagttcaggtccccacccggagtcctcgtcatgatgtccactgtcttattggccgaggggccgctcgagcagggggagaccaccagaggctcaggaggaactaggcctggcaagttttaagatccacggtgccaggtgccccagcacaggcaggacccgcaaaccctccacactctcccccatcccaaggtctccagtctgggaacaggcactaagtttaagaagctggaagatgatgagccatttaaagccaatccaggctcctggagcaggtaggggaatggctgtccccactggggtggaatgtccccacatctggaggggtaccccagtgtctaggcagagggagggaggttcagggggcatccttggtccatgcaattgtcatctggaagcgcttgggtccctggaggaaggggcaagggagggggaaagggagttccttttccctgtgctcctcgatgattcctgagtggctaggacggaggcgccttctgcctggtcctggggtcctttgtcaagggtgcaggccagatgggtgctcagtacacagccccagggttgggcgggggcccgggagaggcatggtgcagggtggctggctgaggcggctgctgctgtaagtggggtccactcaggttctgtgcgtgataccaggagttggtggggtcgtccaggtagctgggggaggcactgtatgggagcggcgggggcagctgactgcgggcaggggccggagtggagtgggaagaggtgtcccagagggcgggtgatggtggtgagttgcaggccatggaatcactgttattgggactgtgctccagcggcacctccccgttcttgtagagtttcttgaacttggaacggcggttctggaaccagattttcacctgggccagagaagaaaggggtagctagttagcctctcagaatgctaaaacaaccctgggaagaacctagccaagaaaaagaaaggccagaacccaatttcacataagaatcaggcaaaaaacaggcctcctgactcccagtttcttggatctgggatagaattgtggctaggaacgttcagctgcctgggtccaaattctgctctgtcacttactaagcgtgaccttgggcaagttgtttaacctctcttgttcttgacttcctcttgtctgcaaaatggggatgagaacagcactattacctgcctcatagggtcattctgaggctcaaataaggtacgacatataaaaaacttaaagcagcctggtatgtagtaagcactcaataaaaggccgttgaggtgggagatggacggtttgtagcatttcattcacattagacacccataagcagaggtgcacagatacacagagacaaacacacccacatacacatctccatacccagccacgttcccactcacagcctcacacacagacaccagacaataaaaatacacgcagacacagatacacccagataagcaccccacaacatgagcacccacattcacacactcaggtgtggagaagttctcctgggctcgggctggataatgggggtgacctggggactcaggagcaggtgagccatgattccccaaatttcccctggggtatctccccctccccctgccactccccaccccatgactggtacaaacaatgaatcagctcctcaccaggtgacccagattcccggcggatggggccccacgcagccacagccacaacctaggcccgcctgtcaacacctggagggagccaggcatccactgctcctcccctgagcagtgacaggctgctgggggctttagggactggatgagggtgggggtgcggcactcacttttgagtccccatctccttcaggtagggaatttggcctctcttgagcgttcaagtgctgagcaggaatgtggtattttgatgcaagcacacatttctgaacatgcattcagaacgcatatacattcagggcgcacagtcacacacacatgcccccatcgttatgcacaatgaccccggcaggatcacactccttacatgagcatcctccggtgcatgcagacccacacagcatgtgtgcaaacacactcgcctatacatgcacacagacagtctgcacacatgcctagcctggagggaaaacacgatgtggactcctactaagtgactagcactgctgggggacttgggagctgggaattctggagtaggggaacatacacagttgcacgggttcacaactatgctcacttgtacacgtgctaacgcagaaccttcccaccgaagttgaacctcgcaggcccccatcccaaaggcaagagttccaggagcccgcagggcccttcagtggccagccaggctcggcagcgcgcggggaactacggggtcccgcgcgcccccgcggccctggacagccaaacaccaacctgtgtctgcgtgaggcccagctgcgcggccagctcggcgcgctcgggcagcgccaggtactgggccttctggaagcggcgctgcagggcggccagctggtagctggagtagatcgtacgcggctttcggaccttcttgggcttcccattcaccatgcgcacctctgcttccggctcctccttcaccgacactgcggggaacgcaccgggcggaagagggggcggttcagcctcggcctgcgactcctgcgaccctccagggccccgccggacgcccctcgcttccgcccaccgactcgccgcgggattcccggccgcgcgctccgctgcccgcggcccaggggggagccgcggccccagagccagaactggccgcggcccacaacgcggcgctcccagctccgcgcccggccgccgcagcactgtccccggcgccagccgccgcctgcgccaggaccgcctcggcttcgctcacgacgccttcccggctcgcctcccagcctcggggctcctcgccgcccggctgctagccgcccccttcccagtcccatctcgccgtcggttgtttctctcgctccttcccgtccgccccccgccctttaaaaaagtttcattttagaatctctttagattttcagaaaagttgcaaggatagtgcagactttctttctttccctgtcccccttcttccccccttccttctctccttcctttcttgtttcttctgccctttctctcactgtctttccatacttccctcttgctgccttcacttttccctttttcagcttctctgcctctcggtggctgcttccctccgctttcccgcaacttccgtgggtccttctcattgccccctcacgactcctagtctccccatcccttatccaaaggagggcccctagagtttccagcccctgccgcctacccccaagccctctgcgacttgatcgaggatcgcctgctgaaatgcccacgaaatcacctcgattcggaggtttcctaacaacccacagccttccccttcctctctcagctcatcccgatcctcatccgggaccgcggcgcactgcgcacatcgcgccccaaatgcttgcacacccggggctggaaggtcgcctggtccctctgagggtcatctaggccaacttctctaactccagacagtacttttcttagaagttttcctagattttggcttccagtccatgccttttcctccctcgggaaccttccagtgtctcccactgtcctcgcgaccccgtggccctcacctgggtcctgggctggcagcggctgctcccgatacgccccgtattgccggtaggaggctccgtaggtatattccgacttgggcgagtaagcgcccgtgcctgcaagcccattgagattgaattggtggtggtaggtgtaggggttcaccgtctggccatagggctggcccgagtagtaatcgtgctggggagcgctgtagtagcccaggtcagtgacagaagactcgggcagggtaggcgagtccttggagcccgcatggcagctaagggagctggagatgtcggtgaggatgctgctgagcttgcgatcgaaggagccactcatcctggcgggcgctgcacctccccagggctggcctccgcagaggacaggaacggaccggagtgcgagagaggcggaagagacgaggcaggggtgtgtgtccagaaggcgaagggaggacccggccgcgtctggggggagggggaggccgagaggcgcttacaccattgcctgccgtcaggcggtcgctgcgcgcctctcctcgcgtcccaagccacaatcaaatgctgccagctccgcccggccagccggttatagactcaatagtggagtcgccgagggaggctcctacgcgctgattggctgcaagtcttgccttccaggcaaaacacgcttttgctctctcgctcctatgctctcctctctctctctctctcccttttccttctctcctccctcctctctcttctttttccccagtctttgttgttactcaaaacacacacacacacacacacacacacacacaccctcgctactcttgtagctccagcccagataagttctctgaaggaggggcgtggaggtggaggggaagggttgctctgtggagcccccaggatctgtcagtctgtttctctggctgggggatgagagatgggcttaggtgaggtgggcaaggaggggagtttgcccattgtgtgtttgtggaaagagatggtctaaggtggggtatggttgtgtgtgtgtgcacacgtgtgcacgcactgtgcaaatgacaggcacacaaatgtacccaaagtggtgaggactcacagcccctgaaaatggtttctcttaaaatcagaagaaaaggaaaacaccttttaggtgaaagagaatgtttgaatatatgatattaatatattatcttaatagcaatgcagtcattgctattatatccttgtattacataattacaaaaacgtaatttaaaaaattttctttttatttaggaaggtgcccaccgggcaagaatgtcttgagcctatgaaagacataatttagcactaggaggatcctattggagaaggggaagcagacctgtgtggatttagaggttgttggggatgtacagcctgtccggtgataccagaactatctccaaagctatgtatgtgcagtttcacagatggcccagtcttgctgaaggtagcaagggacctggggtccccacgaggttgggtggacacaggctggctctgtgactgtgtgcttcagtaagtctgagggcagattttgtgtatcatgggacagcactggggaattgggacacttttggggactgggtgcatgggacgagtgtatttggggtgtgtgatgtgaggatttcatgtgttccacagtatccacagaggtacatgcatgcaggagtgtgtcgggggcggggtgcaggcagcatgagtggagggccatccgcgtgtgaacatgtggttgtaggcagatgtgtctagaccgcttagtaccttcctcatctccagtagctgggagctgtactgctccactgaattcctcctgcaccagaaaagccctgaagaatggctcccctctgtggggacccccagcttttagtcctgtctagcccaccaagctgggccccctaggtcatgctagctgttcccaacgtctagctcatccctgcctcccacaccccattttgcccttcgcctttctctgggggagagaatccaaatctcagttcccagcctgcccggctcgctccgtcgaccccacgtccactcgccctgcctcgccgggcgaacgcagtgctagcgcgccacctcgtggttccttcgagctctgcagctccccgagcccggcgcccggccaagcctcggggaggggtttcctccgaagaccctgcctggcagagcagtgtacagggggctgtatgcccctttccaaagtcagactcgcgcagcaggcttccggcagtccaaagggctttgagagctgcagttggcagaaacagagggcacggtccgcggactgaggggcaggggtgagtgcccgcttggtctgggccactcccggaggccgccgcgtgggaaaggtgggggcgggggcgggcgaggggagcgctatctgtctgtctatctccgcgtccccccagcgcccagcgcccgccgctccgagcccgtggcggggcgagttgccacccgctccgggtgccctctgttctgctgccaagagggcgccaagagagcctgcggcgttgggggcaggaagggcactgggcgggccggctccctcccaggatgggagcgggggaggcgttcagggcctgctttggagctccccctgccccgccccgcagactgtgccctctgttttcgctaactgcagctgcctcagagaacagacagcgtggggcgagcccttctcaggggttcatccattcattcattcattcatcaaccgagatcaagaagtggcaggcgactcagagctgggagtctacctccctccctcctcaggccctcacagaagcctcactcttctttcctcactcctaccccaagccttggctcctgagtaaagagaatgagccctaggctgaattctggaatcctggaatcttgaaagggcagtggtggtggattatactaggataatttctaagctccactatgctctggaattctaagagctctcgaaatggttcatagttcatagaaactgcaacagtaggaacttaaataagcaattaaaccattgtttgctattgtgaggttgacacatgttcccctacccccattgcatgacatgctccaagatgccagagtgggtccatccacttcaccactgccttccagatacccaggacccattgttgaatgaataaatgaagcttcctaatgctgaagaagggctgaatcatcttggcactgctcccgtggacccctggctgaggctcagacatgctgggcagagtcaggacagcgggaagcatggggcaggcactgggctgcagggtaggggaaggccccaagggtctcgtcaggccggcaggaccggagccaccaactgctgggcgggcacctgttagcttaggatggcgaggtagccggaggatgcagtgggaccacagccacccaccccaccttgcccgggccaacaagacgagcaggtgtcagcctggccgagtcctgcctctggtggaggggtgacgtggggcggcctgtgtcaggggcctctgggagtctggtaggagggagaaagggcagtgccagccaatgccaaggtcacagtccattgcccaccctgtctctagcactgagaaaaggtaccctgttgaagcaagctattccctggaacccaggcatcatgccacctgggcactggcacagcagtggggctcagagagaggcctcagggaggaccgagcactggtgggctgaccctgctttctccattgccttggggagtggcgccatctagtggtgattgtaagaaagagcctgcttagctccactgggaagacccggaagtgggtcacctgcaggggcagggccatcgtgcccagaaggaatttacttacttgaggagccctattggcactaaatattcacttttcatcatcaccttgtgttactctttggctgccacctctccctcctctcaccccctttgaacagccagtggctctttcccttggttttctcatttgtaaataaaaaactggattcttagatgacctctgaggtccgtccaagctcggatgctccgtgattgtaaattctaggactctcgtctctcacgggcgaactcctcgaccttctcactaactcccttggagatacaccccaagcttccagcattttgcagcctggacttacttccagagtccttcgttcattcaacagatctttgctgagtctctgctatgtatctgatcccatgctaggtgctggggatgtagtgatgaacaagacagaccaggcccctctcgatggagcccacgttccagcagggggtgcggacacttaacgacagcttcgccatcatgtgatgtgtgctgtgatggggcagcacttgccgccgtgccagcctaagggggcctgaacccttcagggggcaggaggatatctgaaataagaagtgaaggatgtgtgggacttggcttggaaaaacagggatgagggaaaggagaggcttcccggcccttggaaagtgccacctccccctcctccacccacctttgtccagccaggggcgctttcccttgggttttctcatatgtaaatcaaaaagtgggttcttagatggcctctgtgggccatccaaactctgatgctccgtgattgtagactctaggactcttgtctctcaagggtgaagcacagtatttgtgggggtggttggggggtactaaaggtgaagcagggacccaggactcagagcagttggaagcctgaagcaggagaatgggctttacttagaagctacagggaaccactgaaagattttaaccaggggaggatcatgattgggttttcattctagaaggatccctctggcagctgtgtggagacgaatcagaagtgataagactgagggcgaggggcccagatatgagactactgcagaagctcaagcaaagggaatcaagtctgggttaaggcagaggcagtgtggccaatgccagagagaagagaagtgggtagaagtggagagcagtgggtggatttgagagccattgaggaggtcagagggacagggctggggaatggactgggtatgaatggcagggagaagggaagggggggaatgacccctgagcttctgatttgggcaactgggtggaaagttggggccgttctcgaaataaagagaacaccagcaagaggagacgcttgatgaggaaaagaatgtgtccgttttttccccccactggaatctaacatacctgcagaaaagtgcacaagtcctaattaaaggctttgcatcaatcaaacatagctgtgcaaccagcacccaggctgagcagcaggtattgaggaagcaatatccaaccctcagaagccccctcactctcccttccagttcctactccctgagagtaaacactgtctctgctcctagcaccgcagatcaggtttgcatgttttttacttttatataaacggaagtgtatagtatatacagtcagccctcttccatatccatgggctgtgcatccatggattcatccaaccttggatcgaaattattcagcaaaataattgcatctgtgcttggacacatatagactttttttcttgtcattattccctaaataatatagcataataattacttaaataacaattacattttatttggtattacaagtaatctagagataatttaaaatatatgggaagatgtgcataggttatctgcaaatactactccattttatatcagggacttgagcatccacagattttggtatccgaggaaggtcttagaaccaatctcccacgaacaagggagggctgtattcttttatgtttggcttcttttgctcaacattatgttgtgagatttatccatattgttggctatatttatagattgttcattttcattgctgtaatgtggatattttctcatatgaatatatcgttatctatttttctcttctactgttgatgggcatttgggtagtttccagtttgggactatcatgagcagtgctgctatgagcattcttgtacatgtcttttggtgcctgcatctatgctgttgttgggtacctatgggtggaattgtgtgccaccaggtgggcacatgtttggctttagaagaggctgccaagcagttctccaaagtggttgtgccatcagcttaagtgtgatcatgctgagtttgagtgtctttgagacatctaggaagagcagtcctagccatagttagcaacatggatctgaaaaatcagtaaagaagctgggattggagatgtaaattgtgagtatctggcttcttgcggtaagtggagccattggcatgggtgagatggtccaggaaaggagggagagaacacggggcaaaggtccaggcagcacctgtgagagaggggtcagagggaggtgggaagcagtgcagagagagtgtaccctgaattgggtgtggggagagctggggggagggttcaaggaggagagagtagtcggcaaggtcaaatcttgctgtggatttgtagtcagggtggggtgaggactgagatgcgcctactgggcaatgtctcaaggaggaggttgatgatatcaggaagagcgggtaaggggagtggggagctggaagcggttcacagctggctgaggggccagtgggatgcgaggcagtgaagagaacacgtgccagccactctgtcctgatggctgtgaaaggaggagggaggcagagggcggtagctggagggtatttggcatattgggagggtgtgtgtttgaaatgggagcagcatgtttagatgccaattatcacctccagtagagaagggttaatcacgagtgccatccctgagtaggtgggaggggaaggatctggaacttctccaaaggggttggccttatagcagattattatctattccgttgagtcaagagagaagatgaactgataaaagctggctttcattgagtgctcactgtgtgccaggcactgctcgaagccatctacatatatgagttcattcactgctcccaaccctatgagatgggcactctcatgtctgtcttttgacagaggagggaactgaggcacaggaagctaagtaagtggatttaggatttgagcccaggcagtctgttaacctctatggggcaggcattcagcttgcaggtttagcagtcagaaggtaatttgacggagctaggcactggccatgtgggtgttttttatactaccctctgtacttttctatatgtttgaaacatctcagagtaaaaagaattgtacttgggaggccaagaacatggcagaactgcatctctacaaaacaaaacaaaacaaaacaaaaaacaaaaattagctggctgtggtggctcacacctgtgatcccagcactttgggaggctgaggtaggaggactgcttgagcccaggagttagagaccagcctgagcaacacagtaagatcccatctctacaaaaaaggaaatgaaaaaaattagacaggggcagtccccagctactcaggaggctgaggtggaaggatggctagagcccaggagtttgaggctacagtgagccatgatcacaccactgcatgcctgccttggtgacagagtgagatcctgtctcaaaagaaaaaaaaatgtgtgtatgcgcacgcacgcacacacacagagggagagagagagagagagattgagagggaagaaatgtattgcctttgttcacagataacatgatatctatgtagaaaattctggcaaggtgcagtggctcatgcctgtaatctcagcactttgggaggcagaggcaagagaattgcttgagcccagaagttcgagaccagcctggtcaacatagtgaaaccctatctctacgaaaagtaaaaaaaattagctaggtgtgatggcatacacctgtagttttagctactcaggagggtaaggtaggaggattaacaaaatatgtacaagatctatatgagtacataaaactctgatgagacaaataaaaatctaaataaatggagagagactcatggattcatggagaggaagattgttaaaatgtcagttccttccaagttgatctatccattcaatgcagtcccaatcaaaatctcagaaagttcttttgtggatatttacaaatggattctaaaatgtataggtaaaggcaaaagactcgaagtagccaacacaatactgaagaagaagaaaaacagtctgaggactgacactgaccgacataatgttgggccaggcgcgatggctcatgcttgtaatcctagcactttgggaggccaaaatgggaggatcactcgagctcaggagttcaagaccagtctgggcaacatggtgaaaccccatctctaacaaaataaaataaaataaaataaaataaaataaaataaaataaaataaaataaaataaaataaaataaaaagacaatgtggtattggtgaaagaatagtgaaatagatcgatggaatagaatcaagagcccagaagtagacctacacaaatacagtgaattgatctttgacaaaggaaaaaagccttttttttttttttttttttcctgagatggagtctcactctgttgcccaggctggagtgcagtagtgggatcttggctcactgcaacctccatctcccgagctcaagcgattctcctgcctcagcctcccaagtagctgggattgcagttgtgcaccaccatgcctggctaatttttgtatttttagtagagatggggtttcactatattggccaggctggtctcaaactcctatcctcaagcgatgcacctgccttagcctcccaaagtgctggaattaccagcctgagccaccatgtccagccttaattaataataattatgtatcaatattgagtcatcagttgtaacaaatgtatcacactaatgtaggatgttaataataagagatactgtgtccggtgaggcaagagggtagatggaaactctgtactatctgttcaatttttctgtgaaccttaaagtgttctaaaaaatagtctcttggctgggcgcagtggctcacacctgtaatcccagcactttgggaggccgaggcaggcggatcacgaggtcaggagatcaagaccatcctggctaacacggtgaaaccctgtctctactaaaaaaatacaaaaaattagccaggtgtggtggcaggcgtctgtagtcccagctactcaggaggctgaggcaggagaatggcgtgaacccgggaggcggagcttgcagggagctgagatcgcaccactacactccagcctgggcgacagagccagactctgtctcaaaataaataaattaataaataataaaaaatagtctcttaacttgaaaaaaaaatgaggcaaagagattttagaaagatggaagctacccattcagtggtggtgtcttgatgggactttccatgagccatgacatcatgcaccccaggctgtcctgcctcctgcttattcccaagcctgtttcaccagccacacactgaatgcatgcaccatggaaatcctttcaggaaatttcttttagctgtttgtttatggaacagggtgtcactgtgtcaccgaggctggagtacagtagtgtagtcatagctcactgcagcctcgaaccttccaggctcaagcaatcctcccacctcagcctcctgggtagctgggactacaggcacgcaccaccatacctggctaatttgtgtgtgtgtgtgtgtgtgtgtgtgtgtgtgtgtgtgtagagacagggtcctgctctgttgcccaggctggtcttgtactcctgtcctcaaacaatctttctgcctcagcctcccaaagtgccagtattatagaggtgtaccactgtgtccagccccttttggctttttaaaaggcacttggtaaagttaaatatctatacattgagacttaattaactaaattttgagactagcaaagtaggaatggagggaatttgatgaaatggtagaagcacttaccaaacacccacaaaaaccctacgcttaatggggaaattgaatgtctatgaggccaggccctggggttgtataaagaacacaagaagaggccgggtgtggtggctaacgcctgtaatcccagcactttgggaggccgaggcgggcagatcacaaggtcaggagttcgaaaccagcctgaccaacataatgaaacaccgtctctactaaaaaaatacaaaaaaattagcagtgcacgcctgtaatcccagctactcaggaggctgaggcaggagaattgcttgaacctgggaggcagaggttgcaatgagccgagatcgtgccattgcactccagcctgggcagtaagagtgaaactccatctcaaaaaaaaaaaaaaaaaaaagaacacaagaaatagaaaacctggataactctatgtctatcacattaaatttgtaatttaaaactttcccataaaggaaaatctaggtgtaaatggctccattggtgacttctgtcaaacattcaaagaagaaatggttccaaatttatcttctgttttggaaaatagaagaggctggcaacttttcagctaatttaatgcaagcatgaccttgataccaaaaccagacaaatacattacaagaaatgaaagctccaaaccaatgtcttcatgaacacagatgcagagtccttagcaacagccaggtatggtggcgtgcctattgtcccagctactcaggaggctgaggtgggaaggtcccttgagcctaagagttcatatccagcttaggcaacatagcaagaccctgtctctaaaaattaaaaaaaaaataaaaataatgaaaataaaataaataaataaattcttaacaaaacattagcaaattgaatccagaaatatacaaaaagtaatgcagcaatatagaaaagagatggcacaccattaccattacattcccaggaatgtaagattgattttggctgggcatggtggctcatgcctataatcccagcactttgggaggccaaggcaggcggatcccctgaggccagaagttcaagaccagcctgaccaacatggcaaaaccccatctctactaaaatacaaaaaaattagccaggcgtggtggtgggcacctataatcccagctactcgggaggctgaggcaggaggatttcttgaacccaggaggtggaggctgcagtgagccaagatggtgccattgcactgggcaacaagagcagaagtccgtctcaaaaaaaaaaaaaagattgatttaacatttgaacatcaatcaatataattcatcatattaacagaataaaggagaaagttatatgataatctcaatagatgcagaaaaagggtgtgatgaaactcaacacccattcatgataaaaactctaacaactgggaataaaaggaaactttctcaatctgataagggatatgtttttaaaaagtatagctaacagtgttacataatctgctataatatataaaatattatataatatataataatgttatataataatataaaactatagctagcataataatggtaattgaaaactttacccttaacatcaggtctgaagcaagaatgttcactctgaccatttctattatgctgtggttctagtcagtacaataaggcaagaaaaagaagtaaaaggcttacagattgcaaaggaagaaggaaaattgtctttatttacaaacaacatgattggatgtgtaatctataaaaaatctactgaactaataagtgagtttatcaaggtcacaggacacttggtcagatattatatatttcaatagactagcaaaaaaaaaaaaaaaggaaattgaagataaaagaaaatactacttagaataaaaacagggccgggtgcggtggctcatgtctgtaatcccagcattttgggaggccgaggcgagtggatcacgaggtcaagagatcaagaccatcctggccaacaaggtgaaaccccgtctctactgaatatacaaaaaattagccgggtgtggtagcgggcgcctgtagtcccaggtactctggaggctgaggcaggagaatggcatgaacccgggaggcggaggttgcagtgaaccgagatcatgccactgcactccagcctgggcgacagagcgagactccatctcaaacaaacaaacaaaaaacagaatacacaaggggataagcttaaaacatgtataaaccttgtcctctgaacactacaaaaaaaattctgagagattaacacctgaataagtgtagaaagtaggacaaatgactcaatattgttcagatgtcaattgccccaaaactgatctatagagggactttgtaaaaattattttggttttgcagtcaactttaaaaaatgattctaaaatctatttgaaaaagtaaatattaataaatatcgaagacaatcttaacaaggagtaaagagggaggacttagcagatattaagacataccataaggcatggtaataatgattggtttaagaacgaatagagtaatagcatataatcaagggttcagccacagacccagggtgtactgcaaatcaatgggagagaggatagattgtttaatagatactcagagaaaacaaaattcaggctgggagtggtggctcatgcctataatcccagccttttgggaggctgaggtgggcagatcacttgaggccaggagtccaagatcagcctggccaacatggtgaaaccccatctctactaaaaatacaaaaattagccatgcgtggtggctcacatctgccacccagttacttgggtggctgagggaagagaattgcttgaagctggaaggcagaggttgcagtgagccgagatcacaccactgcacgccagcctgggcaacagagcgagactctgtctcaaaaacgaaaacaaaaaagaagaagaaagaaagaaaacaaagtttagatccttacctaatacgatatacaaaggtggactccagatgaatgaaagttctaaatctgaaaggtaaaaaggccaggcatggtgattcatgcctgtaatcccagccctttgggaggctgaggtgggcagatcacttgaggtcaggagtttaagactagcctggccaacatggtgaaaccccatttctactaaaaatacaaaaataagctgggtgtggtggtacgtgcctataatcccagctacttgggaagctgaggtgggagaatcacttgaacccaggaggcagagtttgcagtgagctgagatcgcaccattgcactccagcctgggcaacaagagctaaaatccatctcagaaaaaaaaaaaaagggtgaaagtataaaatagaagaaaatgcagtgtcctgtctttgtaatctagggtagggagtgtcttcaatctctaaagataaaaaattgaaaaattttatgttaacattaagagtttcaattcaaataaggacaccatagacaaaatgaatagatgtatacagaatgagaaaagaggttcacaatatctaaaataaacagaagaatatgtagaaaaattcagactatgtataaactcttgcaatttaataaggaaaaagatagcaacctaattaaaggacaaaagattcaaacatgcaattttcaggatgttacctatatacccctgtgtatataggaaaagatgctcagattcactagtaatcagagaaatgtacattaaaacacccatgaggtagccctttacaactgtaagattggtaaaaattcaaaaacttattagtgtcatgttggctgaaatgtgcatctgtttctgaactctctgatacatacatacctcatgatccagcagtcttgctcctggtagaaccctcacacagatcaccaaggaacatgtatgaaaatgttcattgtatgttactcatggtagcagggagaacgtccattcttggagtatggagaggtaaaatgtggtagacatactccatggagtacttcaccacagtaacaaaatacaaaacatagaaacatggatagattttagaaatatagttctgaaggagaaatgtaagaatgatattgcattcgaatgaataaatgaaaaatgtattatgtttacataaaatacatgtacatattttgcaagaacacataaaaaccaagaaaatacacactaattaaattattcagcaagtattcattgagtgtttgtcatatgccagccaatgttctaagctcttggcattcagcaatgaacaaaaaaagatccctgacctcatggagcttgtaggtagtacagacaaaaaacaatattcgtgataaagaagtcaattatatattgcattagaaagtaataagaactctggaacaaaagaaaaaagtaggacagaatgaggaggattgggtattggaagggcagttatgagagtcttcattgagaagatggactgtgagcaaagacctgaaagaagtgaaagagtgagccatgaagatgtgtgagggacagtgttccagacagaggggagaactggtgcaaagggtctgaggtgggagcatacctggtgagtttgaagaacagcaaggaggccagcatagaaagagagagagcagaaagaatgagggagtgtgccaggagaggggggtcagaaaggcaatgtggcaggggttgggggatcataaagggcctcaaagcatattgtaagactttgagtttttcttaaagtgagatgagtaattattgcagaattttgagcagagaagtggacatggtctgacttgtattttatttgaatgtgtcacattgtggatctctgagtttatcctatgtacagttcattgaacttcttggatgtgtagattcatatctttcatcaaatttggaaaggttttggccattatttcttcaaatattcattcttcccatgcctcttctctatctgggactaccaaaacgtatatgttgacatgcgtgattgtgttccacaggtctcttaggctccctctgttttttttttttttttccccaagatggagtctcactctgtcaccaggctggagtgcagtggcacaatcttggctcactgcaacctccgcctcctgggttcaagcgattctcctgcctcagcctcccaaatagctgggactacaggcacatgccaccacgcccagctaatttttgtattttcagtagagacagggtttcactatgttggccaggatggtcttaatctcttgaccttgtgatccacctgcctcagcctcccaaagtgctgggattataggtgtgagccactgtgcctgtctggctccctcttttttgagttctggtttctttctgtccttcaggctgaataattccaatggactattttcaggtttgctaattcttttcctttgtttctttgtttctttcttttttttttttttttgagatggtgtctcgctctgttgcccaggctggagtgcagtggcatgatctcagctcactgcaacctccgcctcctgggttcaagtgattctcctgcctcagcctcctgagtagctgggattgcaggtgcatgccaccacgcctggctaatttttgtattttctgtagagatgggggtctcaccatattggtcaggctggtctcaaactgctgacctcatgatccacctgcctcggctgggattacaggcatgagccaccgcacctggcagttttgctaattctttattctgcctgtttaaatctgctgaggaacacctcttgtaagtttttcatttcagcgattgtacttttcagctctagaacttctatttggtttctttttttaaatataaattctgtctctttattgatattctctgtttgtttagacattattctcttggtttcctttagctctttgagtatatttaaaacagttaacttaaagtttttgtctaataagtccaatgtctgcacttctatgggatggtttctattgatttctttttctcttttctataaattgcctttcttgttttttcgtatgccttgtaattattttcttgaaaactagacatactgaatattataagattgtaactctgaaatcagattctgcaccccatttgctgttgttgcttactgcaggctgcagtcatcaatttgtttattggcttttccaaactagctttgtaaatactgcatttcttgtcatgtgtggtcactgaagtgttttctattatctcagtcatcagttaatggcctgaccttaaatgccactttatttagcagtctctttcttcattccacactcctttggttactatagttttttttttttattagattctagagatccaaaaacttgattctgtcagttgcttcagtaaatagaccaattcttggagcttcctactctgctattttccataatgtcatccctgatatgtttttaaagttcactctgttcaagatatattgttttagtttgtttgtttgttttgctttgctttgttttgttgagacagggtctcgctctgtcacccaggctggagtgcagtggcacaatcacagctcactatagccttgactccccaggctcaagagatcctcccacctcagcctctcaagtaagtggactacaagcatgagccaccatgcccagctattaaaaaaatatttttttggccgggtgcatgcctgtaatcccagcaatttgggaggccaacgtggccagatcacgaggtcaggaaatcaagaccatcctggccaacatggagaaaccccatctctactaaaaatacaaaaattagctgggcatggtggtgtgtgtctgtagtctcagctacttacttgggaggctgaggcaggagaatagcttgaacccaggaggtggaggttgcagtgagccgagattgtgccactgcactccagcctggcgacagagcgagactccatctcataaataaataataataataataattattattattattgttatttttgtagggacagagtttccctatgtttcccaggctggtctcaaactcctgggctcaagcaattttccgtgccttgtcctcccaaagtgctgggattacagatgtgagccaccacacctggctcatgatatattgttaagtgaaaaaaatcaaggtgtagaaacgtgtgtatggcatgctactatttatctaaaggtgaggggggtggatattggcttatgaatagtgaatgtaaaaccacaaaacttaaaaagagcgattatacacctatccctgatgagtatagatgtgaaaaaaatcttaacaaattattagcaaatagaattcagtattataccatgaccaggtgggatttattccaggaatgtaaagatggttcaatatttggaaattaatcagtgtagtccactgtattagcaggttaacgaagaaaaaaaatcacatggtcatataaattgaagcagaaaaagtatttgacaaacacttaacacccattcattttgaaaattcccacaaaaccaggagtagaggggaatttcctcaacttgataagtgtatctacagaatacttataggtaacatcatacttaatggtaaaagactgaatacctcatccctaagatcagaaacaaggcaaagatgtgcacttcaccactgctatttctatttgcagatgacacggttttctacaaagaaaatcccacggaatatacaaaaaaataccttctatgactaatacgtgaatttagcaaggtcaaaggatataagatcaacatataaaaattaatcgtacttctatatatgggcaatgaacatagaaaaactcaagttagaaacacaatactatttacattgctttaaaaaagagagaaatatttaggtgttaagctaacaaaagatacaggactgcagatgtcaactgggatatttcatttacaataatggattgtcattattgcaattttctgagggatgcgacttaagtgtacaacttaagtgggttgtaatcgggggctttagcagtctgcctttggattgagattttgcctatggattgagataatgctaatttaacttttaacactgtgaatgttgtgaccatgttttctagagttcagataatgaaaacaagaattattataataccaatgccaatgattaccgcacaatataataccaataacatcactggggaaaaatgctaaatgactgtattatcttcacgaaagatggaaggacacatacattgaattggggacgtaaagaaccaaaacagaattccacaatatgcagagaagaatctgggcttgggcacagtgaagttgggcatatgaaagcacacatgaaaactaaatctcacaagtccaggataagacgggcaagtacttctacatcaataaaaagattttttattttccaaaaagacaccaatccttggtcagaaatggcatctgctgaattggcttattcaggacagttctccaggtggccttggacagaattgattttcccttctttcttacttgtagtactcaagaataactgtgtagaatgtactgggagagtaatatcctgagataaggaagaattggctgggacagttcaggttctgttccagttccccctcaaaacaaggtgaccttcaatgctttggctcagcaagtaccatatctccagagtataaaacccagggtgggctggtttccaggtccctctactatggtgcaagtgaggcatgcagagatgagattctagccaccatatggagatttcctgagttttggaagactgtgttaggcagctttctgtttttttgagatggagtctcgctcagtcacccaggctagagtgcagtggcacaatctcggctcactgcaagctccacctcctgggttcatgctattctcctgcctcagcctcccaagtaactgggactacaggtgcccgccaccatgcctggctaatttttttttttttttgtatttttagtagagatggggtttcaccatgttagccaggatggtctcaatctcctgacctcgtgatctgcccatcttggcctcccaaagtgctgagattataggggtgagccactgcacccagccattaggcagcttttgtgctactataaagtaatacctgagattgggtaatttataaagaaaagaggtttaattggttcattgttctgcaggctgtgcaggaagcatggtgccagcatttgcttctggtgagggactcaggaagcttgcaatcatggtggaaggcaaagggggagcagatgaattacatggtgagagtgggagcaagtctgtgggtgggtggggggtgccaggccctttaaacaactagatcttgcataaactaacttgagtgagaactcactcattaccgtggggatgacacaattcatgagggatccacccccatgagtgtatgaaaatacaatcatctcttcccaacagtcccccaaagtcttaacttgttccaacatcaagtccaaaatccaaagtccaaagtctcatctgagactcatgcccaagttcctttcacctatgagcctgtaaaatcaaaagcaagttatttacttccaagacacaatggcaggcattgggtaaacagtcccataccaaaagggagaaattggccaaaagaaaggggtaataggccccatgcaagtctgaaacccagagggcagacattaaattttaaagctccaacataatccttgacttcatgtcctacatcctggtgtgaggggtggactcctaaagccttggacagacctgcccatgtggctttgcagggtgcagcccacatgactgctgtcatgggttggagttgagtgcttgcagcttttccaggcagagggtgcaagctgctggtgaatctaccattctggggtctggaaggtgatggtccccttcccacagctccactaggcaatgccctggtggggactctgtggggctgcaaccccagatttctcctcagcattgccctagtggagtttctctgagggggctctgcccctgcagcaagcttctgtctgggcacccaagcttttccatacatccttgaaatgtaggtggaaaccaccaagcctccctcatgcttacattctgagtatctacaggcttaccatcatatggaaaccaccaaggtttacagcttgtgccttacagagtagtggcccaagctgcacctggggccctcttagccacagctggagctggagcagtcagaatgtggggagaagtgggaccctgggcctggcccctgaaaccattttttcctcctaggcctctggctctgtaataaatgtgctatctccaaggtctctgaaatgctttcaaggtcttttccctgttgtcttggatattagcacttgactccttttagtcatgctaatctctccagcaagtggttgctccacagtctacttgtattcctctcctgaactttccctttctctgccacgtggccaaggtgcaatttttccagacttacactctgtttcccttttaaatataagctccaactttaagtcatttcattgctcccatatatgatcataggctattataagaagtcatgccacttcctgaatgctttgctgcttagaagtttcttccaccagataccctaggtcattgctcttaggttcaatcttccacagatccctagggcctggacaaaatacagccaagttctttgctaaggcataacatgggtgatctttacgctagttcccaacgacttcctcatttccaagactttgtcagcctggcttttgctgttcatatgtttatcagcatttgggtcacaaccacttaacaagtctctaagaagttttaaacttgccttcatcttgctgtcatcttctgagccctccaaactcttccaacctctgcccattacccagttccaaagccacttccacattttcaggtacctttatagtaacaccctactccttagtgccaattttctgttagcccatttttgcattgctgtaaagaaatacctgctgggcgcggtggctcacacctgtaatcccagcactttgggaggccgaggtgggcggatcacaaggtcaggagatcgcgaccatcctggctaacacggtgaaaccctgtctctactaaaaaatagaaaaaattagccgggcatggtgatgggcacatgtagtcccagctacttgggaggctgaggcaggagaatggcgtgaacctgggaggtggagcttgcagtgagcaaagattgtgccactgcactccagcctgggtgacagagcaagactctgtctaaaaaaaaaaaaaaaagaaatacctgaggctggataatttataaagaaaagaggcttaattggctcatgattctgcaggctgtacaggaagtgtggtgtcagcacctgcttctggtgagggcctcaggaaacttacagtcatggtggaaggtgaagaaggagcaggcatgtcccatggtgacagcaagagagagaggagggaggtgctaagctctttaaataatcagatctcatgtgaatgaccagagtgagaactcattgaactcatgaagcccttcaagagggatccacctccatgatccaattacctcccaccaggccccacctccaacactgggaatcacatttcaacatgagatttagaggggataaatatccaaacatatcaaagaccagctccaaatgaattttatgcttctgctgtcccttgctgcctatctgtaaataataaacctgcttcagtaacttgtgtatgtgaatgttctgtttcacaggacttgggtcattggtaaaagtctagtcccaggatacaatgagctgaagtggtaaccagtgcacagtggacctgctttgcagcttgggcatgccacgcaaatgaacaggacttatcatttgttcccttgattgctctgagactgagtaaagttactcagtttcctgatgccaaggttgcaactgaaatatcctgtaggagcgaaagaggtccgtcatgctttccacagcacatcaggcaatccatccaatcacagcaacaacaccaaaaatgatcccctctgctctcaggtactttaatttgaaaaatggagttttggctgggtgtggtgcctcatgcctgtaatcccagcgctttgggaggctgacgtgggaagatcattacttgagcccagaagtttgagaccagcctgagcaacatatcaagaccttgtctccacacacaaaaattagcctggcatgatggcgggcgcctgtaatcccagctactcgggaggctgacgcaggagaactgcttgaacccaggaggcggaggtttcagtgagccgagattgagtcattgcactctagcctgggcgacagagcaagactccatctcaaaaacaaacaaacaaaaatttaactgttcatcttactgtctatgaagattttctaagaaattcacagaaaaacataagacaaaagattgtcaatatcttatccaaatacaaaccaaacctggtgcatctcatctttcatagtcagcagacagggcaaacataaagtctagcaaatatcattcagtctataagcttcttaccaaaaaataaaaaagatctcatctgctaaatcctgcacacctgtacacaataccatgaaaagagggatgatttactgacctatgatattgaggctttcataatggaagtttttttttttttttttgtctgtttgttttttgagacagtctccctccattgcccaggctggagtgcggtggtacggtctcggctcactgcaacctccgcctcccaggttcaagtgattctcctgcctcagcctcccgagtagctgagattacaggcgcatgccaccatgcccgggtaatttttgtacttttagtagagaaggggtttcatcatgttggccaggctggcctcaaactcctgacctcaggtgatctgtccacctcagcctcccaaagtgctgggattataggcgtgacccaccatgcccggcctcatgatggaagtttgaggtcacttttcagtttctccaaaatgtgcagaagcaatttataaaaagtttttactttattattattattattgagatggagtctcgctctgtggcccaggctggagtgcagtggtgagatctcggctcactgcaacctctgcctcctgggttcaagcaattctcctgccttggcctccggagtaactgggattacaggtgcctgccaccatgccgggctaatttttgtatttttagtagagatggggtttcaccatgttgaccaggctggtcttgaactcctgacctcaggtgatccgcctgccttggcctcccagagtgctgggattacaggtgtgagccaccgtgcctggctacattttttactttatataaatggaaggagatagcttagacatgtgcctccaaaatgcttctcattgttgctattcatagcaaagaagttaaaatcttgacctgatgttaaatcacattctgaaagggcgagataaaaagagtgttcttttctaatttggaaatacattaaggattaaggatgagaatggagaaagggattacagtaacacagaaataagttctttctccaaaaccatctgatgatctgtgaagaggccctaaggatgaactgactgcatcagacatgttccatgccatgtgtaggttgtgacagaatattcatacagtaaaataaagtgacttatattttggaaataagactgcttcagagttaaaaaaaaaaaaagagccacccgaaaaacagccaaattaaatagaatttccttaatttctttactaaaactataagttattttgaatccaactttgatttcacaagtttgaattatttctgggctttaaaagcattttcccttagaaagaagagttaaacttctgatgatatccaaggtacttccaagcatttaaaaatgacagacattttagacattgatagtctataagatagatttatatcttatggatataagatgcaaagggcctgattgataaacacattgctgctccaccaaaacaagcctgtagacacaaagtagatggacatttttagtccaggcacggtgcctcactcctgtaatcccagaactttgggaggctgaggcaggtggatcacctgaggtcaggagttcgagaccagactggccaacatggtgaaaccccatctctactaaaaatacaaaaattagctgggcatggtggtgcacgcctatagtcctagctacttgggaggctgaggcaggagaattgcttgaacctgggaggtagaggttgcagcgggctgagatcatgccactgcactccagcctgggtaatagagcaagactccattaaaaaaaaaacaaaactagatggacatttttgaagagctataaactgatttctacaagcctaaacacctgctgtggctagttagtataaaattctaagtattccaggctcaaatgtttttgttgagaggatattgagtttgatatcatcacattggaatgacaagaggaatcagtgtaatacaggcttgacaatggcagaactgcaggtctaagtggatcttacatttgattgtctacagtttcccactatctaaaagaaataaaacatgtcccaaaggctgcaggcagttaggaggagtgttaccagaatagaaaacaggaagagtcatatgatcttactatgacatgggacacaaagaaacatgtcactgaccaggcgcagtggctcactgtaatcccagcactttgggaggccaaggcaggaggattgcttgagcccagcagttcaagatcagcctaggcaatataatgagacctcatctctactaaacatccaaaaaattagctgggggttgtggcccatgcctgtagtcccaggtactcagatggctgaagtggaaggattacttgagtctgggaggtaggggctgcagtgagccgtgatcatgccacagcacttctgcctgggcaacggagcaagaccctgtctcaaaacaaaacaaaacatgtcattgctgttttaaaaaagttaaatataggtaatatctgtttaattagtcctattatatttgtgttctccttttacaaaatatttcatgtatgtatcttaagaatacacagtaatggccgggcacagtggctcatgcctgtaatcccagcactttgggaggccaaggcagggggatgacaaggtcaagagatcgagaccaacctggccaacatggtgaaaccccgtctatactaaaaatacaaatattagctgggcgtggtggcgcgcacctgtagtcccagctactcgagaggctcaggcaggagaattgcttgaactggggaggcggaggttgcagtgagctgagatcgcaccactagtggcactccagcctggcgacagagtaagacttggtctcaaaataaaaaagaatacacagtagtatagactatagaatttaaatacctagtaaagagttttaaaaaacagttaaaataaggccggtgcagtggctcatgcctgtaatcccagcacttcaggaggccaaggagggcagatcacctgaggtcaggagttcaagaccagcctggccaacatggtgaaaccccatctctacaaaaatacaaaaattagccagacatgatggcaggcacctgtagtcctagctactcgggaggctggggcaggagaatctcttgaaccctggaggcggaggttgcagtgagttgagatcatgccactgcactccagcctgggtgacagagcaagactccatctcaaaaaaaaaaaagttaaaataaatggacagaaagagactttataaaagtagtgtttattcacacatatcatttgtttaattgccccactgttaattagtactaattgccacttttaacttgtcctattgttgtttggcttaaataacagcatttatggattagaaaagtaaataatagagaacaacatagaatttcaaataaacacctattttcatatttttacattaaagttataaaatgtgtatatatgacatataatattatgctttttatgttttttctggtatagctgtgtcccacctggctctccaaaaagttggtcaccagagggtgaggggactcaccacctctgccagccagcaccagggtagaactcactttgaagagctcaaacagtgtcaccaggtccacattgtctctctgggccctttgttcccctcccagcctgtgcttgtattatcctcacccagcaagcctagcaatgaaagcacttctgtcccaggcacaggcttgagatagagtctcattgggtgcctttgagtcacacacctgtccccaaactacttgccgtctccaaagggagtggcagagcctggatcatgtgggatcattgcttccagcgcgagatggtggctggggggaggagccccctcacaccctttcagatactggagaagcggttctctactgggaaactgaggcccccttctcagaagagggaagacaggctgtccatttccccttcggcagggagccaaagtgctttctgctaaaccatttttggccaaattcctggagccacacaaacacgcatccattgtctcacttactgtattctatggaaatgatctattgatgtgcctcgcttgctgactgcacagtaagctctcaaggacagggacagcatctggctcccgctgtgtcctcagcaccctgtcctcagccagacgcttgacaagtgccccaagatatccttgggttcctctttttgtttcttgttctcagctcccggttcacatgttccttgcacaatctgcagatgtgcacagccttcacatctgtagctcagcacagacctttcctttgagtccagagctgtgagtcctgccatcttcaggactctaaattgaatgtcccacaggtggctcgaactccacgcgtgggaaattgaacttgctgtcttcaccctattctcctcctgcactgttccctttctcagtgacagctctattgttcattcaaccaactacactctcatcctccacaattggtcaatgcccaggtatcattggtcctgccttccatatacctttcaaatcttccctccacccccatcctcttcattccactgccctgcactgtcctgcaccgccctgccccaggcctcagccctctctcccccaatggcacgcaggcatcctgtgccagaatccgctcccctagagcagcgatacaagggtccagcctgaagccccttggtgcctcccattaactacacactcaagcccaaaccagcagcacgtcagctctgcagcctccagtcccatagttctgcccagctttggggctccagcccttccacaagccttgcatttccctgggagcacatgcctccctgtctgatccctttcttcaggtggctaattcccttttgtcctgggagaccagccttactaccaagaggccccccataatacacaacccagcccctcacactgagagccctgcctctgggctcctgcggccctctgtgcttttctcttctctgccttttcccacatttcattcattcattcattcattcattcattcattcatcttttcagtggtgcattggattgtgtgcccactgttatactcaacaataatttgacttatgtggtaaagttcctgtggttagacaggtgacccctacctaccagtctctccctctggagtgtaagggccaagagggcagggatgacatcccttatctccatgactgcagccaaggttactccgggcctggcacctagtatgtgctatcaattgttcaatgaatggatcaacagaccagctacagcagagattaacaaactttgtaaaaggccagatagaaattattttagactttgcaggccatgtgatctctgtctcaacaagaaagcagccatagacagtacataaatacaattttgtttacaaaagctggatttagcttgtggattgtagtttgctgacctttgagctacaggaatgaacttcctgcagcacttgggaataacttccggcccccaccttcctccccaacgagacctgctcctgtcttctgtccccttctcagcctagccccctggccctttctcccaccctccaatcttacttcctgcccaccctcaaccccccattcccagagcattgtccttgtcatgtctcccttttcagactcagagctccttgcggacaataagttagccacttttccctgacctcctccagcccagccgcctggattctccatcactctcacactcacatgatgaccagcactatgggcaagccagtgacaggcagatatttactatgaatagcacttcctcagctgaacagttggaaagcacatttttctgcatgctttcattcctttgtcagcccctgtctcttctgcctttccctgggttccctgaggcctttcccctcgagactcggccctcctggttccttccctggctaatgcctggggcatctatctacagccttggttcccaggaagatggtgggtacttgtcagaattagttgctgtgaactctctctctctctgtctctatctctctctctatatatgtgtgtgtgtatctatatatgtatgtgttatatatgtatatatacacaattgttacatatgtatatatacatatataacacatatgtacattcgtatatatagagttcatcacagcaactaactctgacaagtatatgtatatatacacgtatatatacatatatgtatacatatatacacatataggtatgtctacatatacacatatatgtatacatatacacgtatatatgtatacacacacatatatgtgtatgcacacatgcatgcatacatgcatagtgcatgtatgtacacacacgcacatatgcatgcatacatgcatacatgtatatacatatatgcatacacgcatacatacctgtatatgtatatgtgcatatatgcatacatacacacatatgtatgtatgcatacatgtatgcatatgtgcatgcacatgtatgtatacatacatgcatgcgtgcatgtgtgtacatacatgtacgcacgcatgagtgcatgtgtgtatacacacgtgtatgtgtgcatgtatgaatacacacgtatgtatgcatgtatgcatgtgtgtataaacacatatgtgtacatgtatacacatatacgtgtacatgtatacacatatatgtgtatatgtatatatgtgtatatatgtatacatataagtatatataagtgtatgtatacatatacttgtcttgctgtgatgaactctatacatatgtatgtatatatgtgtatatatgtatacatatatgtgtatatacatatataacatatacatatatacacacctatgtgtatacacacatgcacacatacatgtatgtatacacacatgcacacatacatgtatgtatacacacatgcacacatgcatatgtacatgtatgtatacacatgcaaacacgcatgcatgcatatatgtatgtagggcatatgtacatgtatgtacccacacatgcatacatgtacccatacatgtttgcatacacacatgtgtatgcgcatatacacacatgtatgcatacatacacatgtgtgcatatacatgtatgtatgcatgcacatatacatatgcatgtgtgcatacatacatgcatttacatgcatgcatgcatgcatacatgtacgcatatgtgtatgcatgcatgtatgtacacatatgtatgcatatacatgtatgtatatgtgtatacatacatctatgtatacacacatgtatgcatgtgtaaacacgcatgcattatacatacatgtatgcatacacacatgcatgtatgcacgcatgcatgtgaatgcatgcacacatgtatacatgcgtacatgcatacatacatgtatgtgtatgtggatacatgcgtgcatgcatgtatacacacatatgtatatatacacatatgtatgtgtgtgcacatgcatacatgtatgcatgcatgtatgcacgtatgtatatgaatgcatgtatgcatgtgtgcacgtatgcatgcatgtgtgcacacatatgtacaatgtatggatgtgtgtatgcatgtatgtatgcattatccatgtacacatatatgtatgcatacatgtatgcatgcatggatgcatgtctgcatgtcttcatgtatgtgtgcacgcatgtatgcatgtatgtgtatgcatttatgcgtgtatacatacatgcatttacatatatgcgtgcatacatacatacatacatgtgcccatgcatccatgcatgcatccacacatgtatgcatgcatccatgcatgcatccacacatgtatacatgcatacacgcaacatgtatacatacatgtatgtgcgcatccatgcatgtatacatacatgcatacatacatccacacatgcatccatacatgtatacatacatgtacacgtgcatgcatacatgcatccatacatgtacacgtgcatccatacatgcatccatgcatccatgcatgcaacatgcatgcatgcatacatgcatacatgctgcatgcatacatgctgcatgcatgcatgcacgcacgcatacatgcagcatgcacgcacgcatgcatgcagcatgcacgcacgcatgcatacatgcatgcatatatgtatgtgtgtgtacctgtatacatgtatgtatacacacacacacacatatatagagagagagttcatcacagcagctaactctaacaagtacccactgtcttcctggtaaccaaggctgtagctagatgccccgtgtgtgtatatatgtatatatatatatatatacgtgtgtgtgtgtgtgtgtgtgtatatatatatatatatatatatatatatatatatatggagagagagagaatatatagagagaaagaaatatatatagagagagaaaatttagatatatatatatgtatcttttttcgggacaggatcttgctatgttgccaaagctggtcatgaactcctgggctcaagcaatcctcctgcctcgacctcccaaagtgctgggattacaggtgcgcaccaccactcccagctaattttttgtaattttagtagaaacgggatttcactgtgttggccaagctggtctcaaactcgtgacctcaagtgatccacctgcctcagccacccaaagtgcttgggattacaggtatgagccaccacacccagctgtgatgcttaaattttatgtgtcaaccagactgggccacagggtcctcaaatagagcaggggagaaagagtcacatggagatgggtctgtgatcaatcatgggcttcccctttgaggaccccgaggctcccgctgccccacatgaaagtggggttctataactaacaaggaagggggaatggatgtcagggataggcaaccagtgatctcaccacacctgggatccccccttacagggacacaaagtaaagggatgcctgaaagccaccatgtgttttacagctggccctggggctagagagcaggacaagggggagtgagggcagctatgaagcccggacctgtgaaaaggagggaagaaacactgtggacatcagccaggcatggagaggcagagccacggaatgccagaaccagagttacccccggttacacagatgggggaactgaggcctagagggggcctgtgacctgtccaaagccacataatgctgtctcctgtctccaggccagggtatttccctgtattagagctgttgtgttcactgctggccgtggtggatcctcactgctgtcctgctctaaatggcagagtgtggctctgggccctgggtgcccatggggactgcctggagccagcaggccaagtgtcttcacacgaattcagaagcaggagtgaaggacccaccctgagacaaaccaaccgacttaacatatttagaagtcggggaagagacagggaaggacagacagaattcctgcctgtccggtccagggcctgactcttgccaggctgaccttcctgtccgggtgaggggaaggaggcgctcatgctctttctgcctggaggacaaaagagaaccagacgaaaacaaaggtcagggcatacgtaggagtttccaaagggcacaggcgaggaaggaatctcttacctaagagggttttcaaacataacagaaaattgcttaagtgtgctggaaaataaggcagcatggctgagaggcaggaggaggaacagggtgaccccgggatctgccttggtggtggcagcccaggcttctgctgtgtggtgaccggtgatgctggccctgaccatggctgcagttagcgcagtcgccaccaggtggcaagcatgcccatttctgaaggattggctgctggaactccgataactggttggttgatggatttgtttatccatccatcatttatttattcaatcgtcattcattcatagctttgattccccccaagcatttttgactcatttgtgccagcaggcattgtgctaagtgtgaggaggaaccaaaactggcccagaagaggtggctgttgtgggcacctcacacggccctccctgctcagcagccccgcgggggtgccgggaccagagtgggccatggcggccaggtacctgtgggtcagtcctgcagctggcggggcctgcctggatcggatcccacggcagccactcgggctagcgccccctgccctccgttctgccgcggagccagcgggcagtgggccctgagagaggtttggctggcctcccatgctgggctcaggccgcccgcagtggggctcaggtgtagccgcacagtggtccctggggctgaggttttctccgtctctgttcttcctccaaccaggctcaacctcaaaccgcgagtccacccctctgccccccttctcccttccctctgctgtgttctgcagcgtttctcagacgtgtacctctccagggcagaaagtggatccctggaacaggactgggtcccggggcctcagggtcaccggatcccttctgctttcctcaagccttgctcctgcccctcccctgcttccggctgtgaggccagcgttcagccagaagcatccatgtcttggctgttggctcaggccccacatgacgcatagccccaggagggcagggacctcagctgattcactgttgaagccccaggaccttgcacagtgcctgccacagagcaagcctcaacaaaggtgggctgcatcactcaaggaaggggagtgaatgcagctgtgcaaagaggagggccacgagcatctatgggagggcggggcaggcgtggatgctgcaggacacagagcgtgcccacgcgcctcgagactgccctgcgttgaattggtggagcccctggacccgctgcagtgaggaccataggagccccagtttgctccatgggactctaaatccagcaggggtggagtcattttttggggcccccagaggacttccttggccagcagctgcagtgcccagtcctccaggagagtgtcagctgccactctgtattgcttccctcctcccctctcctgctgccccagcttccctggcaactggggacactgccccccaccccaactaccaacccaggccccgtgccttctgactcacagcagctcaacaggaaagcatctgatcatgcccacagccctggcatctggcccacaggagtggcacccctccccaagaccttccacacagtttctatattagggtaatgtccattgaaatctctccaccccacccccaagaaacccccctgtgatacgtggggatggcatagcgccccgccgcgcactgtgccaggtggagtgggagtcctgatcctaccggctcatcacattccgcacattcccagtgggcagggtggaggaggggctagccagggaggaagaatgccgcttgcctctgacatcctgtgtctgggtttgcttcatccctaccctccccgcctgggctcagctcccctccatgtgcctcctggcccctcacaccttggaccccctgtctagctcccgcctctcagggctgtcttcccttttctgacccgtccttcctctccattttctcctctctcgctcagccctctcctctctgtcatcctggagtctgtggtgagaattggggagaccaggctgggttctacacagggccactgttcctgtcctagacagccaagcacgctgggtttggtatggccacagctctgcgccatctccttgtgcatccaggacttgccctctctggccatgggctcctcctgggagcgctgggctcccagggtcccagtcctgatatctaagctcctcccaagggccttagtggggatggagcaaaccccaatggtccaggtctccatgctgccctggggagatttctccccaaatcctccttccaaatggcgcaggactagatttgagggtcagctgctcacctgcctcccaccccacctggaccccgctcctctcttgttggaggaggggctgcccacctatcttctttacgcacatctgtgggcatagagtccagtacctgcacaaagttgtcccgttcctgaaatacctacatgcccctccctctgccctctggtcacctcccagctcctgaccacagtgtggtggccgaagtggagctgggctccaggaacctcgagttccagtcctggctctgccactcacttgctgtgggacctaagctagtcaccaccctgctctgagcctcagcgcccgggggaatgacaggaatggaccggtagcctcatgctccagagccaaaggggatacccagcagccccagaccagacagatgttctgaccaggttctgatggaggacatagagggagtcaccagagaggtgttcccctttggagacaactctgttttgtttatttcttttcttttatttttatttatttatttatttatttatttttgagacagagtcttacttactctgtcgcccaggctggagtgtagtggcacaatcttggctcactgcaacctctgccccccaggttcaaacgattctcctgcctcagcctcccgagtagctgggattacaggcacctgccaccacgcccagctaattttttgcatttttagtagagacggggtttcactatgttggccaggctggtctagaactcctgaccttgtgatccgcccgccttggcctcccaaagtgctgggattacaggcatgagccaccgcccctggcctgtttatttctatttttatttttaagagatggagtcttgctctgttacccaggctggaatgcagtggtgccatcatagctgactgcagccctgagctactgggctcaagtgatcctcccaccttggcctcccaaagtgcttggattataggcagggtccagcttctgctttgcttttttttttttttttttttgagatggagtctcgctctgttgcccagttggagtgcagtgatgcgatctcagctcactgcaacctccgcctcctgggctcaagcgattctagtgcctctcagcctctggagtagctgggactacaagtacacgatgcccagctaatttttgtatttttagtagagacggggattcgccatgttggccaggctggtctctaactcttggcctcaagtgatttgccgttctcagcctcacaaagtgctgggattacaggcgtgagccaccacgcccggcactgttttgctttttaattgagcaaggggcaggccactcccaggggttccccaacctcaaaccactgctccctatcccagcccctcagacccttcccttatcagcaaggtatgtctgaaaaagtagtactatgaagattatctgaaatacacacacacacactccattaggttgagtggtgaaatattcaaagctttctactacgatcaggaggcagctgaggagcccactgttaccactccatccagcactaccctacaagggaggcctcaggcaagggaataaggcacaagaaacattgtgagaattgtaaagggagaaagaaaactgccagtatttagatgacatagtggcccatagacaaaatcccccaaaatatacagacaagctgttagaataaataagtaaattgagtaagctcactggatacaaaatcagtataaaaaatcaaatgttgctggggtaggcaaagatttctttttttttttttcctttaaatagagatgcggtctcactatgttgcctagtctggccttggactcctgggctcaagcaatcctcctgcctcagcctcctgaataacaagatttcctaaataggacacagaaagtactaaccataaaggaaaaaacttgataaatttttctccattgaaattagaattactaagccggatgtggtaacccatgtctgtggtcccagctagtagagaggctgaggcaggaggattccttgagcctaagagtttgagtccagcctgggcaacatagtgagaccctgtctctaaaagtgaaaaaaaaaaaaaaaaaggaacgaatcaaatgtttttctaccaatgtacaattagggaaaggaattaaaaggacaacatcatttatacatcataaaaatatcaaatacctaaaaataaatctaacccaaacagtgaaagctccctcactacacagaaaacttcaaaacatctttgataaatacttaaaaatatctaggccaggcatggtggctcatgcctataatcctaaccctttgggaggtggaggcgggcagatcacttgagcccaggagtttgtgaccagcctgtgcaacatagtgaaaccccatctccacaaaaaatagaaaaattagtctggtgtggtggcgtgtgcctgtaagaggctgaggtgggagaatcacttcagcgcaggaggtcgacactgcagtgagccatgactgtgccactacagtccagcctgggtgacagagtaagatcttgcctcaaaaaataaaaaaatttaaagataatctaaattagtgttcatggattggaaagctccaccttgtaaatcctccccaaatcaatctatagattcaatgcaattccaatcaaaatcctggcaggaatgtgtgtgtgtgtgtgtgtgtgtgcagaaatcgataagttgattctaaaatttgtatggaaatggaaaggatcaagaatagccaagactttcttcaagtagagcacagctgtaagacttccagtactagatattaagacaacatggtattagtgcaaggacagaatagagagcctgtgggacagaatagagagccttgaagtgaatccacccagatgtgattatttgatttctaacaaagatgatactgctcagctatactggggaaaggatagtctttccaataaatggtgctgggcaattggatattcatgtggaaaaaaggtatcttgatccctatgtcacatcatacacaaacataaaattctacatggaatatatatctaaatataaaaggtaaaaccactagaaaaaaacagaatatattcatgaccttgggtaggcaaaattttgttgttgtttgtttgtttgtttgtttgttgagatagggtcttgctctgtcacccaggctggagtgcattagtgcaatcctagctcgctgcagcatcaacctcccaggctcaagcaatctttccacctctacctcagcctcctgagtagctgggactataggcagatgccaccatgccaggctaatttttgtattttttttttgtagagactggatttcaccacattgctcaggctggtctcgaactcctgggctcaagcgatcctcctgcctcagccttctgggtagctaaatttcctaaacaggacacaaaaagttctagccataaagaaaaaaaacttgataaattattctccatgaaatttagaacttctaagccgggcactgtggtgtgtgcctatagtcccagctacttgggagattgagtcagaaggattacccgaggccacgagttcaaggctgcagtgagctatgattgtgccgcagcactccagcctgggtgagagagcaagaccctatctttataatcaaaataaaataaaattagaacttctgttgatcaaaagtcaccattaagaaagtgaaaaggggccgggcatggtggctcacgcctgtaatcccagcactttgggagcaaggcaggtggatcacctgaggtcaggagttcgagaccagcctgaccaacatggtgaaaccccatctctactaaaaatacaaaattagctgggcgtggtggtgcatgcctgtaatcccagctagttgggagactgaggcaggacctccttgaacctgggaggcagaggttgcagttagccgagatcgcgccattgcacttcagcctgcgcaacaaaagcgaaactgtctcaataaataaataaataaataaataaataaaaagaaagtgaaaaggaaagctgcagagttgcaggagaaatttgcaccacaaaaggcttgtatccagagcatataaagaacactaatagatcaacaggaaagagacagataactcagtagaaatgggcaggcaacgtgaacaaccccgccacaataaggctttccaaatgccctgtagtcatatggaaagacgctcgatatcataagtcactagggaaatgcaaaagctacaatgagctaaaatgaaaaagactgacttctgaagattggcaggggtgtgcagcaaatggggctcttgtaccagctggcaggagcgtgggttggcacaaccgctttggaaaactttatgacagcaccaactaaagctaagcatacgcagcccctatgactagcaagtccatatctgggcctgtatccaacagaaaagtattcattgtgccccaaaaaacatgcaaaagaatgttcaccacagcactattgtcaacagtcctaaactgaaaaaatccagatgtccatcagcagtagaatgaataaataaatggtggcgtattcatacgagggtgtccagcaatgcaaagaaacaaactgtaagtacaagaaacaagatgggcgaatgtcataggcttaatgttgagcaaaaactgccagacacaaaagaacacatattctacgattctgctgatgaaaagttaaaaaaccagcaaaacgaacctatggtggtagaagtcaagatgattgctaccttctaagaaggaagaaattgggaggagatataaaagggcttgggggatgctggaaatatatttcccaacctgggttctggttacacaggtgtgtccatttggtgaaaatccatccacttttctgtctatgcgttacacttcaattaaatatttccattaaaataaaataaaatggtggcccagagagactcattaacttgcccagagtcacgcagttcttacgcaggaagttaaaagtcttaggttcttattccttcttcgttcctcactctgtaaggttctgggcaagcgatctctttctggggtttactttccccaactgtgtggaatagaaaacacacacacatgcgcacacacacgcacacacacacgttattgcaaaagctggcagcagaactaggaaataccttgctgggctctcttgggatgtgaaacagagagagagagagagagagagagagagagagagagagagagagagagagaaaggatctatctaactaatagcttgggagaactctcggtttcaggagaccactcaggagagaattcctgaggacagatgtggagagagagagacagacagatagagatagagacgaagagagattgaaaaccaagacaataagtggtaggcaaccagagggaggtggaaacatgggcttgggagctgggtggaaaagtagccccttcttctccatcacccccatccctcaggaatgatcccccaccctcactgccttgggtgaagagtatttagggaggaattaaagggaaggggggctgcattccacacctgggctgacacagttcggagcaaacagcccacaggtgagaggcagagggcagtgggaatgcagcaaggacaggtcagggaggccggggtgagggcaacactcaacgccactcgagtatgtgttgttttctttgagccagactctcactccgtcaccaaggttggagtgcagtggcgcaatctcagctcactgcaacctccacctcccttgttcaagtgattcttctgcctcagcctcccgagtagctgggactacagccacccgccaccatgcctggctaatttttgtattgttagtagagacgaggttttgccatgttggccaggctgatctcaaactcctgacttcaaactccagacctcaagtgatccgcccgccttggcctcccaaaatgctgggattcccactgcgcctggcctgggtgtgtcttctaaatgtgagggtggaaggagagcctgcaggtttggaggactcaggtacccaggtgacggagccttggttttcccacaaaagcagcaggggaaattagatgtggtttagggccaacccagcccagcgaactttctccaagcccctgcccacactagctcagggctgcagaaggtcagccccgctggccagacatgaacacaaactcatggagaatgttggaggccaaaggccgaagtggctagaaaaagccatggtgattttccttactgacatctggaggcttgaaggagagctctccccaccccacccattccccacccagacttgtccttggatggaaggattctgacccccaaaagaggcaagggattccacgcaggtcccagtccccaaggatagaatcatctggccctgagcagccaggaactagtggcctgctgattgcaacacatcaaggagcagctgatactgaaggccagggaggtgaggggggggaaggaggtttacccataatatcatctgcctctcaccatttggaggcggcaaagattctgaaggctttgatcgggctgggcctcacctctgactgagctgtcgccagcatgaccgcagtccaccagcaggaaaactgcaggaggtggcactttagtgactgtagtgcacagctgaggcctggagaggctccaccacatacccaaagctgcacagctgggaggtcatgggctggggggagaagaggccagcactctgggggagctggcaggagtgctaggagctgctttgctcctggtggtgaaggaggctccaggctgggggaggagcagtggtgaacatagcccctaagagaaatgggagactgctttgatggaaccctcctcatcaaggcttatctccagatgccacctcctccagccagccttcccagatgtccttatcaaagaggctgtctccttcctcatctccatccccaaccccccagcacacagaccatactgagtcctgtctcccagcctgagtggggccctgccctgcctgtctcccccgagcactgactggtatctgagtagcagggtggatgggctctgcaggctgtcctcctcagggagcctcacatggactttgagcagggtagctgctcaccagcacttaggccaaccagagaagagctccatgcacctctgcccagccccaagctctccttgggaaagctccatgacaggtgaggtcagcccaatccaaggcttcagaatctctgcagtctccaaatggtgagaggcaaatgagatcgtgtgggtaaacttttctccctgctcatctccctggcccgcagtatcagctccccgcagcctgctgcctcctagaagacttcctgagggagggaaagacggtggcagagagtaggagccagggacagacagaggatcttccagaagctgggagaggaaaaggagagcttggggctgggcaggggtgtttagctctcccatgatggccgcactgccctccaaagccctgatgccagggtggacctgccctccctgccctggctcaggacttgcaaaaggtgtggaaggaccagccggttgccccatcctggatgggcaagaatttgggacccctctctgcctctcagctcccactctcccctgtgatccagtcccagcctggaaagccctgttcaggggaggagaggtggtgagtgagtaggggtcccgtcctttacaagagccctttgtcccaaggggcctagagtctctcaggctgacggcccctcccgggctggcctggaggcagaatgaggactccccagggggcagatgagacagtgtccctcattgtcctcaggtgccttatggggcaagggagcaggtgtttaccgactcaggagaggcttggttgaagtccaggtttatctgcttaaaccacgtcgagggggagagggaggctgtttgttcctacgtttccaccccaaacctcccagggcaggggtgggggcctgcaaagggcagggaaggctgagggcctgggctcttgacactccaaggacgtcagccactgcttcacctggcctggttctcttcctcccaccaaacctcttttcagtgagtggcacctggattcctgtcccaccctgtctgtgcagacatgagagatgaagaaagagggggacagagagacagagggagacaggaataggagaaggaggtgggtcatggaggcagagtcggtggagcaggggagaagactccaagagggacttgggcagggtcctgggagtggggcccggctgcccagcttgggaggggcagcacagggctgattgtccaggggccgctgcagcctccccaaaccctccagtagtttgggtatgggatgtggctgtgtgccctgggaggtggctggcgggcccagggcagtgtccccactcctgtcaagctccttgagtattttttcctgtcggctctgcctctagggaccgcttcccgcccaggatgtaaggcaggcagcagcttgtctgacccagcctggccctgggggagaccccattcttggtggctggataatctgagccagggagacaagagagactgctcccacccccatctcagcagcctggaagagcaaggcaagagagactgctccccgccctttgcttctctacctctcgttggagagcaggccataagcatctggggtgcagccagattcctgccaggcgggtgggctgggggagggatcggggcaggcagcgggctactgttctcctgcaccgcctcccaggctcctgcctcctctggccacccctccctgtgtccaaggcctgctcgcctgagtgagacatgagtaatggacacagcacagggcctgacccaagggccttggctgcaggcccagcactaggaacactgtaaatatttgggggaattaatgatgctccttctccccagccaactctctcctgcaacccagaaggcttatgggaggaggccacagtgtccatccctctgcctccgagctgagacaacattaaggatataggggtccagactgctgggtccttgactgggtttggccacagacaggagaaccatacttgtaatgtggctgcaccatctcagccatccccccggcctccaggccagccagcatctcctccagcctggagatcccaagccttctctctcaggcacagaatcctttgttaatggatgttctttctgaaatctagcttctgcccttccaggaaccccttccatggttctgggatggcaatgaatgggtctgccctttaggtagttaatggtgctcctcaccctgctctgctgcatcccctcctggagagcttctgcctgctgtcaccctgtccaagggcccaaccctggtggatatccctaaacttcttggggtccccttccctgccttagcagaagcctggagcaggcatggcctctctacctttcctgacatttccccctctcctgtggccttagattgagacaaggatgtcgtttgaaagaagtctctgaacacttaccataccaggcagctgggaattttgaggtcatctcaaggtgctccctgtccccactcctagggccctgagagaggctgtggatgcagggctgcgctgggttgggctctggagcaggaaagctggaagaaggcagttgtatgtgcttctccaatcttactcccttgtccagaacttgatttcaaatctagtttcatgagactcctttgacccacttccttggataatattgagcaaggtattgaaatcctctaaggctcagtttcctcatctgtcaaatggggaaatgaggatttttttgagcatcagatgagatatgcatgcaaagcacttagcataaggtagaatatgtagtaagtactcaacaaatggtaaccagtatgactaagacttttaagacttaaaggccagttttccttctccaagttccctcagctccaagctccaggtgtgtttctcatggcctgggagaaacagagctgttctggaagaaggcaccttgggacgggacaagacactctgctccagcctgactggccctgatcaggccaacctgcttcacccactcttgcccccactgccaggattatcataggcccccagatccggtgccttcctcccacacccaccagcctggccaggctggtgcctatcccacttccaggaagagggacataaacacagctggggtggacgagggcccccagcatcctctctggaagcagtgaagcagtcaggggctccaggatggatcagggagaatctgggaattcctaggactcaggtcagggagtccagggagaggagaagctcccgttcctagagctgaggaaagaagtggcagggtagtcccctctgaacactgtgtttggatccctaccacctctgcctccatatccggtgggtgtgaagtggtatctcattatggtttgaattgcatttccttgacgactaacgatattgaacatctttttgtatgtctattggccatttgtatatcttctttagagaaatgtctattcagaatcctttttaaccatttcactggcacgaagccactaggctgtcctcccgctttcatgtccccaccacagcctggcttccctctaggtgcagctctaccaggccctttccctgcttgaaccttcaatggctccccactgcttgcagccaaacttgctaaaaagtgtgaaaagtgttttgtgagaggttggaagaggttcttctgaagatgattccatggttgaaccatggtcaaaggtttggaaaatgatacatacactaacccactccaggactttgccaatgcatattagcatataaaaggctcagagaagtcccaaagcaaacaatcccctctttttttcttgtttagagacaggatcttgctatgttgctaagatgacgctggattcaaactcctaggctcaagggatcctcctgcctcagcctcctgagcagctgggactacaggcccgggccaccatgcctagcaacaatcctctgcttaacccagcatttcccaagctgttttgatgatagattcacaccccctacttgtatttattttttacagctttatggaaatataattcacatgtcatagaactcattcatttaaagtgtacagtttcgccaggcatggtggctcacacctgtaagcctagaattttgagaagccaaggcaggaggatcacttgagaccaggagttggagaccagcctgggcaaaataatgagatgctgtctctaccaaaaaaaagtatttaattttattttaagttctgaggtacatgtgcaggtttgttacacacatagacatgagacatggtggtttactgcacctatcacctaagtattaagccctgcattagctatttttcctgatgctgtccctcccctcgccctctcccctgccaagccccagtatgtgttgtctccctccctgtgtccatgtgttctcattgttcgtctcccacttatgagtgagaacacattaggtttcctgttcctgtgttagtttgctgaggataatgacttccagctccattcatgtccccgcaaaggacgtgatctcattccttttcatggctgaatagtattccatggtgtatatgtaccacattttctttatccagtctatcaccgatgggtatttgggttgattccatgtttttgctattgtgaatagtgctgcagtgagcatatgtttgcatgtatctttataatataatggtttatattcctttgggtatgtacccagtaatgggattactgggtcaaatggtatttgtggttctaggtctttgaggaatcgccacactgtcttccacaatggttgaactaatttacattcccactaacagtgtaaaagcattcctatctctctgggacctcaccagcatctgttgtttcttaactttttaataattgccattctgactgacatgagatagtaccttgttgtggttttgttttgcatttctctaatgtcagtggtgttaagttgttttttgttttttgagatgtaatctcactctatcacccaggctggagtgcagtggtgcaatcccagctcacagtaactttcgcctcctgggttccgggttcaagtaattctcctgcctcagcctcctgaatagctggaattacaggtgtgtgccaccacacccagctaatttttgtatttttagtagagatgggatggggccaggatggtcttgaactcctgatctcaggtgatctgcctgccttggcctcccaaagtgctgggattataggcatgagccaccacacctggccctcatgcacaggtttttgtgtgaatacatgttttcatttttcatgtgtacatacgtatgaatgaaattgctgggtcacatggcaactctatgtttaaccatttcaggaaatgccagactatgttttgaatcgattgcaccattctacctttcccccagcaccgttgagggctccaatttccccacatctttgctaacacttttttttctttttctgtttcttttttttattctgagatggagtcttgctctgtcacccaggctggagtgcagtggcacgatattggctcactgcaacctccgcctcctggttcaagcaattctcctgcctcagccttccgagtagctgggagtacatgcatgagccaccacatctggctaatttttgtatttttagtggagacgaggttttgccatgttggccaggctggtctcgaactcctggccctaggtgatccgcccacctcagcctccctaattgctgggattacaggcatgagccactgcacctggccattgctaacaacttttatctaactttttggttctagccatccttgtgagtatgaggttgtattttatcatagttttgtcttgcatttccctgatggctaatggtattgagcattttttaatgtgcttattggccatttctatatcttctctaaagaaaggtcggtctattcagatcctttgcccatttttaaattgggtcatctttttactactgagttataggagttctttatatatgctagatacaaatccctgatcagatatttatcttacaaatattttactccattctgtgggttgtctattttgatagagttcagtttatctattttttcctttgttgcttgtacttttggttttatatctaagaagccattgccaaatccaagatcacaaagatttactccaatgttttcttctaagaattttataggtttagggcccagcgcggtggctcacgcctgtaatctcagcactttgggaggtttaggtgggcagatcacctgaggtcagtagttcaagaccagcctggccaacttggggaaaccctgtctccactacaaatacaaaaattagctgagtatgttggtgcatgcctgtaatcccagctactcaggaggctgaggaaggagaatcacatgaacctgggagacggaggttgtggtgagccgagatggtgccactgcactccggactgggcaacagagtgagactgcatctcaaaaagaaaaaaataatttaatagatttagcacttatatttagggctttgatccattttgagttaacttttgtatatggcctgaggtaagggtccacttcattcttttgcttgttgatatccttcttgtatctttacaaaatatccaatagcatcttatgggactctggtgctccaggaaacactaactggaaaatgttgatgaggtccaagtttcttagtcaacacaaggcatctcaccatctgcccccaacttgtcttttcccaatttctctggactggcctcttgctattctctagacttgcaccggggttttcctgtctctgtgccttagtgtgtactgttctgtaggtcactcccacgcacacatctttgcctgctgaaattcattcatcctccaaggaaaaataatagctaatatttattgagtgttcaagacgtacctgacatttttttctaagaacattatttgtgttatctcatttaattcttgcagtgactctatgaggcatatactcctattatacccattttacagatgaggaaatcagtgttcaaggtgatcaggtaacttgcccatggttatgcagttagcaagtgatgggggaagaatttgaacccaggcaatctgacttgagagtccctgcttttaacaaatcactactctcctaccagtctttgcttatctctgcaactctgtccaccactttatttgtactaaagtatatttactgagcttcacccagtattttactgaaagaacaagttagtgagtgagtaaaagaatgaatagaactggattgtcagagttggaagggatccaagtagtggtatgcattccagcataatgacctgacttgatggatggggaggtctctgcaactcctccagggtcataaggtagggacagaggtgacatcagggcccaggtctctgccccttctgccgggcagtgttgacgccatgctggctgcacctccatgcagcatattacttgagtatctcctttgtttcagactccaatctgaactcagtccgaggcaaacaggacaagacccctgggaccctgccctgtctccctcctccagggaaggaggcttaggcccggcagagctgctcttgggcttcaagaccctcctggttcctcccccatgcagggccatccctggggtctcaacctagctttctctgtttccttggagggagcatcgggaatgaaaggcggcaggcagccaggggcacagggtggggcggaggaagggccccaggtccggttcatttcctggcaccgttgtttgctgcatgcccctggcttctggtggctgtttccaccacgcccacagtgtccctccctggctgagtgggcagctggcctggactggaattctcccatatcctcggcctccgtcatctctccgctggggccattctcggagcccagcagatctgggggagaattctgctcctcgcactgcgcatgaccttgggcatgtcactttgccagtctgggcctttgtttcctcttctggaaaaggggaaaacatgactgatctcacaggcttgtcatgaagaatcaaggataatatacatgaaggcctggcacagtaaaattcccaataaaaacgactatccctttttctctgcctgcctctcccaatttcccccactcttccaggatgcccacttccccctgcctccccatccctgtgttggagtctcagtctgagccctaggtagagccttttctggggtcctctgtgatgggaacaccttccccaggtgctgatccctctgccaactcttgggtacccatagaaacacacatgcctcacagtgatgggacctgagaggacccacggggacatcgtaagtgttttaatggaccagaggaggttcaatttgaccacatcattgatctccatccaagcagaacactgtagtagcagccattggcagggtggagaaagagggtctgagctggctttcctagaggtcagagctcctggtggagagacagctgctgccacgccctgccaccatggccgccatcatcccagtagaaaataggcaaacaagacaagacccccgggaccctgccctgtctgcctcctccagggaagggggtttattttctatttattttactatgtgctgggcactgtctgagtcttcatttactctccacaagggttctatgattggggtgcaattatcaactccattttacagatagagaaattgaggcatggagagctgaagcaacttcacccaagctaataggtgacctaatgtggctcatgctccatcagagggagaaacagacctatgctgaactggaaagcatcggccaagacttgggaagcctggaagttggtggatttcagttggccttgaaggaaggggagctttcaacaagcaagaggaagctagagtgttgcagggagagggcccgccaagcaaagtcctggagaaagtggcaggcaggtgtttggggcatgaagacctgcctcacaggctggggttgtgcagagagtggaggacaggggctgaaggtgagccctgagaaggcctcatggcactgcacacccaccgtccctgccagtgtgcaatcatggcctgcatcctggccccactcccaggccatggggtccctcccaccccaatgcacattagcctctaactggcctctggtcatctctgagccatagtttctttatttgcaaagaggtaataatagccatgcccaactctcagggccgtggggagggttaactgagccatccatgggaagcacctggcgttgggcccagcacacggtgcccttcccttcccttcaagtcaatcatctcctggctccaggaggccatcttattccctgatctgaccccactcaaaacccaaccctggatatcttacagaaccaagcccaaagctcagctccccagcccagagtttgaggtcctttgcaaaccaccttgctcaccttcaggtgcagaaaggagggagggactctcagagaatgaatgaagtagggaccactggagctgcagacagggtcaccaagaagctagaatgagaagagggctggaaggaagagcagagctgaggaactagagcccagggtgcaagtggtgaaaggcctatagaaattggggattagggccaaacaggctcacgtctgttatcccagcactttgggaggctagggtgggtggatcaattgaggtgagcagtttgagaccagcctggccaacatggtgaaacctcatctctactaaaaaaaatacaaaaattagctgggtgtggtggtgggcccctgtaatcccagctactctggaggctgaggcaggagaatcacttcaacccaggaagtggaggttgcagtgagccaagatcacgccactgcaccccagcccgggtgacagtgtctatctcaaaaaacgaagaaaacgaaagggaagggaaggggaggggaaggggaagagaaaggggaaggggaacgggaagggaagaaattggggattaggagggttatcttgggtgagcttcctgtgggcccagcctgaccgcacaaagccaggctggcacagcctggtcaacatcaaagccaaggccccagggaaagacctctaagaattttcctctgttcatgggtttagcatggaccaccttgtggtccctttgggcttcagtccccttgtgtagctccaaccctatcccagggtctttggcaaattgccagctccagcttctagggcttctccaggccctagaagtggtagagacttcctggctgtccttgctgctgccctcttcccatgtcccctgtatcccacctgccaccagctcctgcttagcccctcccctaaatgtccctcgagcctatctacatttccacagacccttaccctttcccattttcacccccatattaactcccaggtggatctccttaactcccgatcagagggagctttggacccacaaaggctgtcggctcattctcatgcatgaatccatcagctcccctcagttccaaggccagcaagccaaggcctaaactcgggcaggcaccagtgtttcctgagcatgtccctatgtccctcatgttgctgtgccgtggtttctgccccactgccctgctcctgttgcatctggctcccctcccttctctctgctgtgtggtgggctgggctctcactctgcctctgggtcacacctgtcagaaatgctgcccagggtggttctgccattgagggcgtggccctgacaccccccaagccctatctgactcctccactcagaggggtccctgacgtccatgacaaggtgggtaaggggtcctccacagggagaaggccaaggtcttgggggattgttttccgaggacacgaaagccccttcatcattgccctcatcctgttaacagcctgagaagcaggtgccacgggcctggctggaacccctgcccaccccacctgcccccactaaatcattctttatcccaggtcttccccatgttctggccctcctgacccctgaccaccttaatagttgcttgactcatttgtacctcggggccagagtctctgtaggcaatgccgtcactcttgccccttcctgcctgggagcacccagcggtactctgccaggtagggctcctgcatttaaacaggagccttcagggggcaagggccaaacccataggagggctgcctaatagtgagcatgtctgtgatcctggcaggaaaggagagagccattgtggggatggggaacttttgttgcctcccagatcaagctccctaagggcgccttgccccgggcatcagacctggggtcccaagaacagggcgtgtgccttccctcagtctactctaggagagctaactccttagtttggctggcgcttgcaagcaggtttcaaaccagcagtaattagtcccacaggggtgaggtcagcagtgagggggcttgtgggagctgtgatgaggggtgagggctgggaggaggcttcagcctgagttactgagggcctcagtccattcagagcaggcgaggaggaggaagtgagtcagtgggcacagcgattcatgccttagaattctgactttctttttcaacccactgagccaagacgtttgtcccaacaggatcctagggtgggggaggggacaggaggcaagggatattaaagagacagggctggcctcttattcacttgcattgggctcctgttttagtgccatagagtacgtggtgatggaactcagctggacacaccgtggttgaagacctgccatgtgacggagaagctgccatgggggctgggaaacgcaggggtcaacactgagcataaccaccaccacttggtgggagagcagctgacttctgggccccagttccatttcaacaaacccatgaatttggcatctttatgtggaatttatagatgaggaagcaggtgaagggacttgtccaaggtcacagtcccactggtctaatcatactgccagcctgagcgagaagtcagtgcgagtcctggacaactcaagagtgactagggatgggggttggcgttggggtgggaaaaggctttactgaggaagtagaagctcacgaaagattttgaagaacaagtggagattttccaactgaacaagtggggaaagggcatcccaaccagaggcaccggcgcatgcagaggttgggtggcatgggctggcctggtgctgtcgtgccgggcctctactgatggcaccaggttcaagaggccgaggaagagacccagagtccgtgaacgagatatagggtttgtggggagcttacatgcagggacagtccagtggcagtgggccagacagaaccacaaccgcttgaaaaatgcatggcatttatatagcattttcacttagtacactgccccagcaacctctacctggcaacccgcatttaacccaaaataaaagacctcaatccccggtcccctccatggctcgaattccacgagagatgggccaggggcttagatgttcctcatagataaggaatgagtctctgggttgcccactctcggattccttagctccaaattccgaatgcagattcttctcaagttattgctgtcaggtgtatctgccatgcaggtgtgctcgtggaatcctgctgggagtggggaccaggcaccgagacagaggctattacaggaggagccccttgttgaggaagaagggaagatgctaagtacttctggatacatggagtccaaggagcctgcggccagccagaggtggctggcaagagttaaacatcaaggctggagcctggcgggtttcatcagcatggaggagaatgttaacgaacaaggggtcaactgaggagacataagagatgagaatcacaaacagaggcccaaagtggactgaggaatcttgcaagagggagagagttctaggaaggagagggtagagaggagtttaaataaaatacagatggagaggtcaacaggtcgctgctgccaccctagaaaggtcagagggcaaggggccaaagttgaccatagtgtttgcccatcagaagagccttgtgcccaaggagagaaggaggatccagtgagacggagggggctgaaggcagactggggaggtggaaagggtcacgataaacctaaggtcaggatccctactccagggaagggtggacaggtgactccactcagaggatgtgacttctaggctgtgacctcctggaagaatagagggtagcccagatgactggtggtggagaaacagcaaaaggctggaggcaagaggaagactggctccatcgaggaactgcaaggtgctctgtggcctgggtgaagaattagaaggggtgaggggcagcggagggcggagggggggggcgtggaaagatgagcagggccatctcagggatggcgttgtatgctgagggcagcaggaaaccatcagacataccaagtaggaaacagacttggggagatttgcaggaaccccactctggctgccatgcaggtggtagggagagttggaggcagggagggcaacaggaagcactggcagtcatccagggagaagggacagaaaggagcagacacactggcaagacagcaagaaggcagaatcagggacacagtgattggctgagctgggtgaagagaaggaggagcagacattcaagcttccagcggggatgagcccctggagcagagcactcgggtgccccaagtgctggtgcctgaggaacttccaatcaggaacttggattcagcaactgaattcacggggccagaacttgggagggtgctgatttgggagttatcaccatatggtctgagttattaagagccaataagatgggctgggcatggtgactcacacctgtaatcccagcattttgggaggctgaggagggagttcgagaccagcctggccaacatggtgaaaccctgtctctactaaaaatacaaaaattagcctggcgtggttgtgtgtgcctgtaaccccagctactcgggaggctgcggagaattgcttgaaaccgggcggcagagttcgcagtaagccaagactgtgccattgcacttcagcctgggcagagtgagactccctctcaaaaaaaaaaaaaaaagagccaataagataatttttacctaaatatcagtaaggcacaatggagaggatttcccactttggtattttagtctttatttctacctgagcaaataaccacatttcatctagtgtacggcagatacatgcctgtatccattagtattgcattacgaagaaggcaatgaaactcagcactgatgagccatgagggcgatggcccctaatagggcaggtccgggttggccagccacgtggatacccgaccagaagtatgtgccatgtccaaggtggacgccaccatcgtccattcacccagctactcccaagggccttacttgaccctgtttccaaccacaggaccaatcacagccactggtggaaggataaatacagacacacacacttctcactcctgcccctgaggaaccggctctggaggaaagcccatcactgtggagttggagaaacctggggtgttaccagccacagtggggaggtattcatacctcctgcaccttgggcatgtcagtattttcaaccatagcctgggaggcatctacgcctcctagggttattagaaagtaacacacgtaaaaggctgcacacataatatgtgctccataaatatttgttccctatctatattcaaatatacataaaacattcagacatgcagtcgcataggcaaacacctgtgaatgcataagggcccatgtgcacagacacatgttttgatcatcatacgtgtaggaaccctctacccccagtggagtgtctagggagttagtgggtaaaagtagatgaagccctgcccccgacctctccagatttcccacctgagcacagaaccctgccagtaaagaggcttctccacaggaaatggcaaggcccttggggggtggtgactcagccctgactcagccatgtggcctcctgggctccaaagggccaccttgacttgaggttgagaatgctgtaggcacagcagagtcttaatctcccagccaggaaagaaggggactctgggggccagggcagggcatgtgcagcagggccaggccctgggcagtaggaaaggaagagagagacagagggatggcaggcagggaagtccccggatgtttggggcctactcaccacgccctcatagagatcattgcctattaatccccagaaagcctctgcactttccctccttcacttccagcatccctctcgccccacacctgtccctgaagtcccagtcaaatcagtaccctgggcctttcttactcattccctctctccctccctcagccctgctcctgctcagcccacttcttggccaaattattacagtagctgccttcccccacaacccagtctgtcctggcaaagtcaacttcatgtggcagccagaatgttctgacagccccctttgtcccacaagcaccacccctaacatacaatgcaaagtgggtttagcctgtttaaatgtgagagcaaccagaacatgaggccacatcctggcctcctctaagtcatccccgggttgggactcagcccaggattggtacatagtaggctgtcaatgaatgcttgagcctggcagattctgagccaggggaatcgcctggactaggcctgcatctgggccataggagaaggaaatctgataaatccattcaatcttcagcactcctccctccctccctcttcagtaatttgcattttcaattcaagtcagatagacccctgagtctcagtccaatagctgagatttggtacacttcgttgaacagatattagaaggtttgggatacaatgaatgtagattggggaatagtgagagatttctctccagccctttcatttcacacatggagaaaccgaggcctggaacggaaggtaacttgcccaaggtgagaaggcagaagagagcttgcattcaacggaggggcacaccattgcaattccttgttatttttccagcagctgcctgtgtgcttcacgtctctgtgctgatctgcccgagaggtgatggtgtccattggtgtgctctggggctctgggagagtgagatgagggctggggagagggcaggtagaggaagacttgtgggaacacagcaagcgctaaataaacagaagccgcctttgtgggatattgacattgtcattgttccagctgggaaaacttcacctgaaccaggacccaatttttctgcctctcttctccagctcctttctttccctgttgtccagatacacctcctccagggagcttccatgaccccccagcagaactcaccatttgcatgttgttacggtcacctgcagaggcagatggatcccatccaaggtttggtttgaatgaagactgacgacaccacccaaacaccaagagagtatgaaaaggtttattatttacataattgaggtctccagggggagcaggggcagtctttcaagcaggtcccagatgtgttgggagagccaggaaggagactggcctgggtttttattgtggttgaggggtgagggttccctcaggaaggggcttgtgaatattccccctcaaacaccaaaggagggtgcacccagactttcttatcagcttgtccaggtgtagggcacagagaagagggaagggtgaggcttaaaatctgtcagcaaacatcaacaaatggacttagactcctcattacacatattattcctgtgtccttgtttctctgtctgtctgtgtgtttctaggtgggtctcttccccatgggggagggttgacagataaagagttgacatgataaagtcaactgagggatgagatgatcctacagacgacggtgccactgaaaccaaagaaccctgagatttctctttctccatctctccagctgagatccttctagtctccatgtctccctccactcccactccatctccccagactggtctgacactcccccacattctttagctcaggccctccccctaccagtcgcccctgctctgctccacattccctctggacactcccctggagtggaaaaaccatccctcatccctttccggctcccagtcccaggatcggacatgctggtcattcctgtttgggatgtccaaagagataaggcctggcatggggccaatctgtcatcgcaggactctcaaagctgtttcaggcaggatcctcacccacatggcgtttccaccctaagcccctgcccttcttaccctggctggctcctcttctccaggaacatggcagaggactcaggagccaggcagagagcaaagatcactgttcaacttccatccaggtcagcttcctgttccttgaccccacatgtcttctaatccctgcaggccctgggccacaaagcagaccatgagagaggctgggtggctctggaagtcagaggtcaggaacaaatcctgttctaagggccgttagagacaagtgtcttctccccaaacaccacagagaaagctgttatcacagctgcttttgtttaggcatgtctagctgtctgacaaccatctgcctggagtttgtcttcttaaagacacggttgtggtcagcggcttcagtcctagctctgcctcccataaaattcagatcttggacaggcaggtaacctcctgaggctctgttttctcctaagtcaaatgaatatcataatccccacctcacagggaggccaggaggataaaatgagcctgcttgtgaaatgatttgtaaactgtaaagctaggccaggaccctttcccaggctctgaatctaattttgtactcataattcttatgagtacaaaataattttattcttaaagagcaccccagattgcacaagcttcaggacccaccaaacttggacacgcccaaagtagtgtataaatgttcattattagcataagtagttaagggctccagggtcagataacacaggatgaaaatcctagttgtgtgacctctgccaaattgcctaacctccctgagcctcatttttctcgttttaaaacagagataacacttcaaagattgttgtgaggatttaacatttgtgaagcatttagcatagttcctgctgcgtatgtgcttaatacatggtgttttgttcttattattttaagaatagatggagaaaagaatgctcggggaggccaggcagggtggctcacgcctgtaatcccagcactttgggaggcggcggggtggatcacgaggtcaggagttcgagaccagcctgaccaacacggcgaaaccccgtctctactaaaaatacaaaaattagccgggcatggtggtgggcgcctgtaatcccagctactcaggaggctgaggcaggagaatcgcttgaaccccggaggcagaggttgcagtgagcggagatcgcgccactgcactccagcctgggagacagagcgagactccgtcgtctcaaaaacaaaacaaaacaaaacaaaaaaacaatgttccggggaaaatgggtctctgagctgcaataagagaaatgtgagttagatccaagaaagtacatagtaacctcttttttttttttgagacgacgtctcactctgtcacccaggctggagtgcagtggcgcgatctcggctcactgcaacctgcgcctcccgggttcaagcgattctcctgccccagcctcccaaatagctggaactacaggcgcccgccaccacgaccggctaatttttgtatttttttagtagagacagggtttccccacattggccaggctggtctcgaactcctgacttcgtgatccgccctccccgggttcccaaagtgctgggattacaggcgtgaaccactgcgcctggccagagtaacctcttgaagttccctttcgatttgattccttggtggaggagacctttagtctccgcccacttactgccacctggccctacccaccaaacacctgatgggtgctgacgtccgagcccagtctccaaacactctgttcgagcttgggtgggaagagggagcctctgggattctgctgggctgggccctgaaggcaggagtggacgagaaatggatacggtctaggctcagcttcccggctacgcagtgcgttctgtgaaggacggactcatttctacattgacagtcttagcctttgataccagaagtcgcagcacttagggggaaaaatgctttttggtaattataattagcgacatttggttgttaccactgctaaatatgtctgtctttgctgaggagccaatctcagctcggatcagggtgagtggataggagaaataaatctcggcaaagacagcgaggggcctgagtgcgaggaagaactcccagagaccgccagccacctcttggggactcacagcgctgcggaggcgagtccagcattctagccagccgcgcacggacgtcggttcccagatgcgccaatgccaggtctctccagcccggctggccttttcagcagcagcagcagcagccgcaggaaagcggccagacaaatcccacccccggccccgcccgtcacatccatcttgctccccaggcgacgctttctcggagaagcgaggggcggggaggggaaatctaagcctttgggggttgccgacaggtgtttgggggagaaggcggagctggggtagggaggatgaggagggaggggcggtgctgcccctttaagaggaggcggccgagccgggatctttttctctttccccggaaggaaagcgcagcccgggctgggctcgcaaggtggggaggtgcgggactgggcgtggggaggcggggcgcgcgccgggggacccctccctcctgtcctccttgcggtcgaccggtgcgcttgccagatccgccgcgaagccgggatcgaaggcgacagcgcggccaagggggcgcggccgggacaagctgggggccggttgcccggggcagggacggcggcgacccggccgctggggaggcaggaagatagacccacggatcttaggaagggatccgagagcgcagctgtgaaactggctggggctgggggcacgaaaccgatcagcgctacggagcgcagcggccggcgggttccagtgtcctccggcggcgcggggagcaggtgaacaggtcctcacgcccagctccgcgccctcacgcgctctcgccgggaccccgcttccgctggcagccatgggccccggccccagccgcgcgccccgcgccccacgcctgatgctctgtgcgctcgccttgatggtggcggccggcggctgcgtcgtctccgccttcaacctggatacccgattcctggtagtgaaggaggccgggaacccgggcagcctcttcggctactcggtcgccctccatcggcagacagagcggcagcagcgctacctgtaagtgaagctggagggtgtggggtgggagcgagagagtgtgcgagcgcgggatgcgggtccggagctgagtcggagcccagggcagctggcccttgggagccaggattaaggggcggccctctggctgctgggggttggcgggaagtggaggattgggtgtggggtcgggcagtaatcattggcaagtgctgacggggccagaacctgtctggacgccacccctccgccctttagatctctcatgagagcggaagtggggtcccggtggctgagtcctctcccattctgtgaaccgagtacccagcactagcctgttctctccagggctgggagctggggtaaactgcaagataaacacccagcggactccccccttcccgtacgcttgggggaaaaatgagcatatacatttaagcacctcgctggtagtctgcggccacgccagccacaccctctgcagagccagactggatggccttctcaaccgctggcttggcggatggagggtgaggcgatgggtgagtctgggcgtttggagctgtccatacgctccctctgacgccttgaggataggggcggtgaaagagagaggaggacttgtcccaactctggctgggtctcctcctgcccacccgcaagcagtggcactctccccgcagacatcttccctgcattccacagattcgtgttggatcttcaaccctgagtgtgtttgttttggtttgaagagggaaacagtgtttttctctttcttctgttctccttccccaacagctgcaaggaggaggggaagagctatgcacagtggaggaaggaggaggaggttgcacccagcctcctgggtccccctcactccaccagacgccctcatgcccaggagcatgtccaggcttcagaggtctctctgccgtggcctcagagcgcgcggaggttggcggttgggggaggtgaagctgtccaaagagggacggtgtttaggacaggttaagcaggtaccatccaccactttgggctgggcgatctgccaggcatctgcccccacctagcctctgcccccacctggcctctgaccccactgaacaagaagacgtggtcacatccagggtacactggaaaatctccctgctctggctggggcctgcagagcttgaggaagtttagaatgtccaaagtccaaactctgcccccgccttggttctgccctcctgacccagcctacctacctggacttaacctcaactccatcttgctcttgcagaggctagggctaccacacccttcccagcctggccccagcagctgccacctggccttagccaaccctctatcttttggagatcctgagccaccatgagcacaagtttctacatcagctctttctgccctaactgagaaaaagattttcagactttcaatgccaaatctgcatgatataagataacataggtaaagagatcagactggaaagaaagagtcaataatgattccgcaacccttttgcctggtgaccttgagcaagatatttcccctccctgggccaggtttcccccaaaacgggttggacctggatctagtgctctttcccactgctgctggcctgtgagaagcaacttgatatggtagagggagaagaggcttggaggtcccatggccagtgtcctgtctcagatctgttaccaatacctgaacctgaatttccgcacatgttggagggaggggaacagcatgccttctgctgggatgttagtggggctgtaacgagataaagtgcgtaaaatcctctgcacatgtgcctttctccaaggagcacctgaaggctcttgcgctgaggccagaacctggatgcatcctcattacccatgggccccgcccagggtggctgagcaaaggggttctacttttctgtctgggaagctggagctggcattcagcctgccaagagcccagaaggttctaaagctaatgaacctctgaggggcagttctctcccttgagtatcctcagtctttcctaagggtggttctgtgtcttggcccttctcttcatctcactaaattcgacccctcggccatttgggagagccagctgggcttagctgcagccagctgtgtagccagatgcaaacagctgcctgagtgcacaactcagaggaactaactagtaagacgagctgcagcctcatattctgttagcctgaaagtctctttggaaaagtgggatggttcgtggtcttggacaggctcttaaactggggttcgtagaaggttttcaagagatgcagggactccctgaaagtgtacccaaaatcgtagtatttgtccactgccctgggggtgggaggaggggagagcacagctttcttgttctccattcataaggcctcagaaatggttagaaacccaggggtgggaccctctttgctgccccatcaccttcatctctggactggggttcctggtccacaacatagggggctagccccaacccagggcccagtctcctagtctgtggaaatgaggggtaaggagcaggcagaggaccaaagtgctctgggcttcttggcaagatgcatgaggggttccttggagggacagggactgttctctgggaggtggttactgacaccctctctgctccagcacctgcactgacattccctcctgggaatccaggcattctggtctggcctgaccctgtgggcctatggggatactgccggtccttctctctctttcacttttgcttggaaatgagggtatctgggaagcccagggcagggtggctcctagaaatgaggtcatgcctgaggtacgcaggagccaggctcacctgccatgctctcctaacatcatgtttccctgggcaaagcaggtgcctggcagccttcaaggttcgtgccagcagaaatgggcacagcagctgtggctggaggcagaaggcctgctcgtgtagtatctttttcctctggctctacccagtgaccagtctaggccaagaggctttcaactgggcaggagtaggggaagcctgatcttgtagaaaaagcagcagcgaagggggcttggtcagaagtaaacaaagaaggaagaagatcccctttgcagtaagaggaattgaggttagatgacacttagaatgccctcgggggtcaaatacaggaaaaatactgaagagccaaggaaagggagcagaactgagaaaaatggccttgttctttttttatctgaggcttagccagggctctttttcctgtcctttctcattctctctctccctccagcttgttgctctggttctagggctgagtcaccagtggggagagggggctgggtgggcagcaagggaagggtcaggaaggatggggagggctgcagtttcagctgccacagggccggcctctggggagatggctaattcgggcagcaaggctggcatagagctgggatccaggcatcccagagctgcccccaccccttctctggggctcagaggtggagcaggcaccctccccacctgcctcccggccggggataggaggggaacacaggaggctaggtacccaaggagtgaggccctgccatgttggcctgagtgctagatcctttggccccctctggaatcctcccatggagccaccaagtgcctccctgaggtgacagaatctgggaaggtgaatcttacaggctgcttctctgagcattaccccaccccagtgcccccaggggccttctcctctttgaggtgagccaacctggtaccctgaattctcctgggtactgtgccgcgcccttctttgattcttctgctttctccttggctgttccattagctctgaactgccccaaggggagtgatagggcaggggtaaggaagggctttttcggaacttggagctcaaggggctccgcagaggccaagaggggctgtttggctggagccaatgggagggtgaggaggcagctgttggaaagcccttgagtagtcacttcacccatcccactccatctggggggctgggggtctctgctccccccagtccagcctgactccaggagaggggcagtcccatctcctatcttccttgctctaagagctccatctaggcatccctccacctactctccctccttctggctgcagctgaggggatgggttcagtactgctctggaaggggtcagcttttggattttgtgatctggaccagacctaaaagcaggtggctggcagaattgctcatttgtgtactaatttgcatttcatttgcatacagtaaggtccctctcaccttcaggattctccaaccccctccgcacacacctgggtgtgtgtggctggaggaagctggaaccaccctctgcacacccgccttcccccatccatgtgcaggcctctggctgtagacccattggatcctgggctgggagccagagggccttaaagggcctctgagtgggccaagtggaagctaaaaatactctgggggggtgaagcgggggctcactctggaatctctgaggagggaggggcctgggatgtagggctgggattagggcactggccctgccctgccctctatcagtaggcataaggctggttccaggcaacaggcaggagggtattggtggtaaggggaagtatttcaatctgattgacatgcgtgcccagctctgcctgctcagtaccttgggaagttcagaggagggagtcccttagccccttcctggctgagttgagggggctgggagggcatggagacccttttgctcagctgcctcctgtatgacaacatgggcagggcagcagcagcaacaagggggcaacacttccattacaggcgtgcccaaggcccggcctcccactgaggcccggaccccttagtgtcactgtagaaaattcccaacctccacctccagccagatctgagcccccgctgtagagtgactctagctgccagcgctcccaccctgaccccagtgatcacctggtatcctcaagccatggaagtcttcctatgtctccctgctgatctctctaaaccaccaaaggagtctcttcttttccctctgctccaggttccctaacatgccagggcagaaattcctgggtccagccaggcacggtggctcacgcttgtaatcccagtaacttgggaggccgaggcgggtggatcacctgaggtcaggagttcgacatcagcctggccaatatggcgaaaccccatctctagtacaaatacaaaaattagctgggcgtggtggtgcatgcctgtaatcccagctacttgggaggctgagtcaggagaatcacttgcacccgggaggcggaggtggcagtgagccgaggttgtgccactgcactccagcctgggtgacagagcaagaccctgtctcaaaaaaaaaaaaaaaaagaaagaaaaaaagaaattcctgggtccctggagggagggctggaggcatgctagaccagtcctgatgccacaacaaatcggaacaacaatgctcacattagctatggcttcatatcagaacacctttttgtagaatagacctatttgttcctctagcaaccctggaggtcagcaggagaggggctgcccccattttacagatggggcactcagggctcagagaaggaaaggaaattgccccttcaggcagaacaaaccctagacccaggtccgtgggttctcaggctgagatgctcctttcccgcaggctgtgggtcccttctctcatctgtcaggcacgccagagagcggatgtccatgggtggtcaggcagtggactcatcgaggccttcccagcccagagagaagtgactctccaggcctggctgccaccctggccccctgccagcctccctggccaggaagcttcaccccttctcccaggaacacttccccagggtgaggtctgagctgttgtcttgaagtataggcaaggtcccacccccttcccagcacccgcaggcagtacattcctgactcccagtgggtggagataccccaggccctggcatgcccaggccctgcactgccctgccctgcccagcccactccctgtagcccacactcacaggtcccaggcagaagctacaggcgtggctgttgcttggcacttccagactggcaggaggcccagagcccaagttctgagctgggagctgtagagtgatagagttgctggggccaaatggtggggcacctgggaggtgcctgccacccgagaaggccagggccatcaggattgagcaggggctcctggcagaacatttagaggctgcagggaggtgatgtggggagaaaatctgctaaaactgagttctcaaactggggtgcaccagattccaccagatggtgtgttgtgggcagaggaatctacctttttaacaaagatccccggggtttctgatggcccaaggcttgtcctctaagatggcatttcagggccaacccctgcctctttctgctccagccacccctctggtatgggacgggttgccagggtcctaagcatccttgcaggaacttgctgtctgcatccccaaagatggattctgggcaggctgggagcaaggcaagagccctttccctccccacctgctgcccacccactgggaactctgctctggggccacattgtccaaagtgtcaggtacttatcccaacccctacctgtgtgcctgtcttaaggtaactggggaaggatgttggacatcacccaggtcgcttaggggcccaggtctccaagatctgagtctccacatggcttcaggaggaaaaacccagcgttctgacaacccagtcccctaagttctcccctctgaacccccagaatttgaactctctgccaggattcctcatcttgctctcttctggtctaccttcatctcaaaggccaaagcattccttccaaaactgagatctggccatgtcatgcccctgcctaaaatccctctgtggttcccctaaggaccttcccagcctgcctttgtgtgcctccccagaggctcctggactccagctatgctgagggccttgcaggtctctgattcaccctgctggctcttgcttcctggccctgcacatgtgtgcctttgcccaagtgctcttcctccccttcttcacctggagaaccctggtgattgtcctcagactcagattaggtcacctcttctgctggcctccatcactgccccctcagccctgagcctgggctactgtgctccctgcttcccactcccggggcacttccttctagtgtcttttttccttgcctgccttaccctacactgggcacttctggagggcaggagctgggggtctcctggcaccaagaatctgtaaatgtatgttgaataaataacaagttgttccaagtggggcttggggagtctgaacccggacccacctccgtccctatccccaggctcctggctggtgccccccgggagctcgctgtgcccgatggctacaccaaccggactggtgctgtgtacctgtgcccactcactgcccacaaggatgactgtgagcggatgaacatcacagtgaaaagtgaggggaaggggctggggaggggtgctgggtcagaggtctggcaggggggtaccgcagagagaatggcctggaggagatagaaggcttgttcacacggcttctagtcgcttcttgtccagctgggaagagggtgccctagaggagagtggggctggatgggattggtagagctcagaataatgacgagctggagaaggggagttgggagggctgccctgtgggtggagggcccaagcgggacccactcctgccctctggagactttgggcactgaagtatgggtgaggtgctctgattcatgatccttccggtgcccacagatgaccctggccatcacattattgaggacatgtggcttggagtgactgtggccagccagggccctgcaggcagagttctggtaagtgggtgctcagtgttggctcctccacctctacccggctctcccctcatctccagagctgggaggaaagaagagggcagcaggggggtccacggcgcgtgtgtgctggggcctgcacacatgtcccttcctgtggctgtgtgtccctcgctctctgcactcctggggagggggtgagtatcctgtgctctcccaaacccccgcacggcctgagttctctgactcatccacttcctccgcatgcctacactgggtgctcagccttcgtgggaacaagccgagggagccgagggaactgcaaggaggagaaagggcagagagggccccaggcagctcagcgctggctggcgctccttcctgggaggctgactgccggaagaggcccagccctgctgaccccggctcacccagctctggtctgggggctaatcaaatgtgtcacctcctgcccacattctatagtggcagcccctgagttctccatttctgggtcccagatagacatttccccccgcatttttttctctctctgtctcttgttgttgttgttatattccaaaaaggattttgattttattgcttcacacacagaagagttctggttaaggcttgccttgctcctggtgctcatatgatgccaccaggatgtgatttatctcaagcacttaactctgtgttcttcgtgttgcctccattctttgataggcattcttttcgtagtgccaagatgaatgcaacagcttcagctttatcttctttgaccttcaagttctatagtcccagtagatatctgactacaactcattagctctgactatttcaggtactcctctctgaaacaattactgtgaccaagagaatgcaatacttatactttcttcagacatgaattatcagtatccagataggcacataaactcagtcttagaatgtgttgctttgatgtcaggtttttctcttgccttgatagttccacatggctggggaagcctcacaatcacggtggaaggcaaggaggagcaagtcccatcttacgctgatggcagcaggcaaagagagaatgaggctgtctctctctctctctctctctcttttcttttctttctcttctttcttctttctttcaagatagaagactcccagctgggtgtggtggttcacgcctgtaatcccagcactttgggaggccgaggccggtggatcatgaggtcagaagttcgagaccagcctggccaatatggtgaaaccctgtctctactaaaaatataaaaaataagccgggtgcagtggtgcccgtctgttgtcccagttacttgggaggctgaggcaggagaatcgcttgaacctgggaggtggaggttgcagtgagccaagatcacaccactgcattccagcctgggtgacagagcgagactccatctcaaaaaaaaaaaaaaaaaaaaaagactccatctctcaaccaggctggagtatagtggtgccatctcagctcactgcagccttgacttcccagactcaagcgaccctccagccttagcctcccaagctaatttttaaagtttttatagagacagggtctgactgtgttgcccaggctggtctcaaactcctgggctcaagtgatcctcctgccttggcctcccaaactgctagtgctaggatttcaggcgtgagccaccgtatgtggccccatttttctttttctttcttttttttttttttctcttagagatgaggtctggctctgtcacccaggctggagtgggtgacatgatcatagctcactgtagccttgaactcctgggctcaagtgatcctcctgcctcggcctcccaagtagttgggattataggcaagagcaacaatgcctggcttttttctcattttaaaatttgatgtggccaggctcggtggctcattcctttgggatgaggcaggaggatcgtttgagcctaggagtttgtgatcaacctgggcaacacggcaaaattccatctctaccaaaaatatataaattagcccggcatggtggtatgcgcctgtaatcccagctgcctgggaggctgaggtgggaggatcacttgaaccccggagagaaaggttggagtgagctgagatcatgccactgcactccagcctgggtgacagagtcagatcctgtctcaaaaaggaaaaaattgatgtaatgtttacatacagtgaaatgtacagatttcaaacttcaatgaatttttacaaatgtatgtacctgtataaccaaagatatatcttaaaatcactccagaaggtgcccttgtaaccccttctaatcatttgccaccccataagccaccactgctgggatttctgtcacctttgaacactgttttaagctccaggttggcatcagttcactgaaatgcctttttgataaccctgttatggatggctgtggtctaggagcccatttaaagtgattctgcaccctggatcctttagcagttatttactcactgttcattcaacagatatttggtgagcccctactgtgtaccaaacactgtgctattcctagaagcttagcagtgactaagacaggctcaggtaacatgctggtggagctcacagctagaagggaccacagaaagcaagtaaacaagaaccagggcctacttctggactttgcctgtctccaggctgttttaagtcaccctattctggcccatcagtttgcccaataaatatatactgagcagctaaagtgcacccagagaggctgcgcatagattctcccctccgtgaagcagcacagcatgtgcttaagagctcagattttggaaggagacagccttggtttgaatattctctgcctctctctagatatgagatcttatgcaggttactgagctctccatgcctcagtttatctaaaatgggggaaataatcattcctacaccatagggtcactagcaggcttaacacttaatatgtgaggagttcagaattgtgcctggcatataggaagcactcatgaagtgttagctgctgctattattattaccgtcattgtaattattattttaataatggtcctttcattaagaggacagggtcatctggagatggcagagcagcaagtcccttaatctctctgttactaaccccttctagaccaagagcctgaaccccacagtctctcatccttccctgctttccctttgctgagatctctaagccactctcagatccacactttacagctttccaaaaagtgttcctgaccctcagagcagatttctgaattctggaaaggagatgcaggtttaagtatcactgggagaaggagaagccaggagatctcctttgactcctgtttggcaaagccagaggcttacagggtaaaagagacagctgacccgggtccctgtgcctgactaaggctgcctgtgtttggggggtccccaggtctgtgcccaccgctacacccaggtgctgtggtcagggtcagaagaccagcggcgcatggtgggcaagtgctacgtgcgaggcaatgacctagagctggactccagtgatgactggcagacctaccacaacgagatgtgcaatagcaacacagactacctggagacgggcatgtgccagctgggcaccagcggtggcttcacccagaacactgtgtacttcggcgcccccggtgcctacaactggaaaggtggggaccatggggccatgggggaagaaaggaagagcagagaccacccacccctagttagccacggggacagctggcctagaccatccacactagaaacaggacctcatgccagtatcagcaaccaccatgacttctactgttttaaagcacttactatgtgccaggggccttacgcatattatgtcaatcaatcttttttgttgtttttttgacatagggtctcactatgtcacccaggctggagtgcagtggcacattcatggctcactgcagcctcgacctccccaggctcaggtgatcctccaacctcagcttcttgagtagctatgaccgcaggcatgtgccactacacctggctaatttctgtattttttgtagagatggagtttcaccatgttgctcaggctagtcttgaactcctgggcttaagcaatccaccctcctcggcctcccaaagtgctgggattatgggcatgagccaccatgcccagcctcaatcagtcttttttatttatttatttatttatttatttatttatttatttatttatttttttgagacagagtctcactctgtcacccaggctggagtgcagtggtgcaatctcggctcactgcaagctccacctccagggttcacgccattctcctgcctcagcctcttgagtagctgggactacaggtgcccgccaccatgcccggctaatttttttgtatttttagtagagacgggctttcaccgtgttagccaggatggtctcaatctcctgacctcgtgatccgctcacctcggtctcccaaagtactgggattacaggcgtgagccaccgcgcccagcctaatcattcttaaaatactcttatgaggcaagtattattatatccattttacaaaaacaaaaactaagacttagagaagtaaattgcccaaggccaacaaagttatgaaacctggattggaatacaggtccatctgacttcagtttaaccatttacaaactaattctaaaaataaaacatgctcctggtacaaccactacatagtacagtaggcaatgtcctataataatagttatcgccaggtgcagtggctcatgcctgtaatcccaacactttggaaaactgaggtgggaggatcacttgagcccaggagttcaagactaacgtgggcaacgtagggagaccttgtctctacaaaaaatttaaaaattagccaggtgtggtggcacacacctatggtcccagctactcaggaggctgaggtgggaggatcgcttgggcccaggaggttgaggctgcagtgagctgcgattgtgccactgtcctccagcctgagcagcagagcaagaccttatctcaaaaaactaaataaatatcgctactttctctctttctcttatcaaaagtcatgggcactttttcatgttgatatatataggaccatcattttagaggatgaagggtattttcttgtaaaagaccatgcttgtaaaagaccacactacacatggtctcacagggggtgtctgacagcttatactccctccatctctttgcctccctccatcacacaggttgtagcaatagggaccccttttcccttactgaacctttattgttgtagaatcagcaggcagaggagccttgaatctcctcttgaccaacatgtagccccaggcatagtcacagctctgggctcaccgaaggctgaggcctctgccccctcttctggtcctgcctcccaccccctggtcatgtagcaccttggcaaagtcacagatactctccagcagcagccctgggtgcagggtccagctaggcagcccgagtttggggtcaggaccagaaagagataatggtgtggagtctgacctcagtgtctagagagtggggaaagccatctagcatctaatatccaggagcctgagtgattaagttctagccatggctctacaaccagctccccatgggactatgagcaagtcaacttccctcctgagcctcacttatctgcaaaatgggggtcataatttaacctcaaataattgttataataggccaggcacagtggctgacacctgtaatcccagcactttgggaggccaaggcagatggatcacttgaggccaggagtttgagaccagcctggccaacatggtgaaaccttgtctctactgaaaatacaaaaattagccgggcatggtggcgcatgcctgtaatcccagctactcgggaggctgaggcaggagaatcgcttgaacccaggaagcggaggttgcagtgaggcaagatcacaccattgcactccagcctgggcaacaagagcaagactgtctcaaaaaaaaaaaaaaaaaaaaaaaaggaaaaaagaattgttaaagaggatgtgttttataaatggcaaaatgctcaccaataaaaggggttattactatccttgttgggtgggggtgggggtgggctggacatggtagaggaaaccagaaaccggtggtgacttatactccctactctccctccctcaatccctgtgaaggaaacagctacatgattcagcgcaaggagtgggacttatctgagtatagttacaaggacccagaggaccaaggaaacctctatattggtgagtacagtagtggtagcccatcaagtggtagaggggaagggggcttagtccctggtggaaaggtgaggccagagtgcagttgtgactaatggcatttagttaaactagcacacacggattggccggcacctgtatgccaggccctgttccaagctcccaagatgcaaagttcttgacttcaggatgctcacagtccagtgtccaggcagaactgggccatggctgctggccatctggagtctactttcttgccctacttggaatagtgggatagaacatcatggtggggggcaagagagggaatagggagatgggtccagagtagaaagagacgaagttgactgggaccttggttgaacatcttccctctatcccagggtacacgatgcaggtaggcagcttcatcctgcaccccaaaaacatcaccattgtgacaggtgccccacggcaccgacatatgggcgcggtgttcttgctgagccaggaggcaggcggagacctgcggaggaggcaggtgctggagggctcgcaggtgggcgcctattttggcagcgccattgccctggcagacctgaacaatgatgggtgagaatctagggacatcctctggggccagggagagcgatgggcgggggaaggcttacctaagccaggtgaggggagtggaggatttgcagttgtgcggctgtctgcatgttgtttgcagaggtttgcagtcaggctttatgggagtctgagcacctgcacatggcatttgtgggacccctgcgtttgcttgtttctgcttgggatttgtatgctccagtggatgtggattgtttgggtttgatttgtgcctgcatggcgtctccatgacatatgtcttctatttggtgggtcatattggcatctccatgtccttcccatgcacatgtccttcccacccatgacctgtggccggaagagccatttgcagagccctgtgccctggcacagtcacacctgtcaaacaagaactatgctgcatattggaggctgacctcacactcccatttccctcctctcctgtgtaggtggcaggacctcctggtgggcgccccctactacttcgagaggaaagaggaagtagggggtgccatctatgtcttcatgaaccaggcgggaacctccttccctgctcacccctcactccttcttcatggccccagtggctctgcctttggtttatctgtggccagcattggtgacatcaaccaggatggatttcagggtatgagccagcactcctcccccagcacccctcctccagcacccctcctcccagcacccctactgactgagcaccagctgcacatcaggcttgacagggcccacagatgagacaggatggggccggacctggggagctcgcagcagtactagagagaggatgtgcagatgtgcagaggaagcacagaggcaagctcagtgggcctcctggaggagcttgcatgccactgtgcagccaaggctgggctgagagtgcacagtagagaactgatggggcacaacatgggtgtggaaactggcctggtgtgcccaaatctagcgggtgtagagtgttcacatcagagaggaggctggagggggagtggggtggggtggggtgaggatggatgctttgaaagccaggcagagtatcttagggatttatatttgggtaatggtgatggtggggtcatggggcatccagagaaagttttagggcagggatgtgatataataactttgtaccctgaaggatgattctggaaggggtatggaatgagtgattgcagggatggagcaaggccaggggagttaagatcaagaatgtaatatctcaggtgggagatgataaggaatgggacaaggtgggagccctggatataggggtcctcataagtgttctgcaggacttggggaccaatcggacctggggtatcagggacaggggcagacccagggctggagtcagtgccatgggggcacctggcttatctgaaagtcacttctctgataatctcagtttcccaggacatagctgagaaccaagaggaaggcaaaggagcctctgaagacccaaaataggtgccagaaagttcagtcaccagaggccaagtgtgcactgtggaaatcatttggtttcggcctgggacctgcttctgctccctttacaggccttactaacaagcttggcttgctgattccctaggccttatctgatccaaagctgcaaactggaaagagttcagtttaagaagataaccaaatacttgggggttatttgtggagataatgattagaatgtaaaaagccttgacactttcagtgaagttcactgtagtgttgtggttaaaatcccagcccctgctgtgagacagccctgggctcaaattttctcttttctacactcattagttgtacaactctgggtttttggagtgtctcctcatctataaagtggggggataatagtacccaccccacagcactctcgtgaaaattaaatgaatagctgggtgtgttggtgtgtgcctgtcccagctacttgggaggctgaggtgggaggatcccttcagtccaggaggttgaggctgcagtgagctatgactgtgccactgcactccagcctgggtcacagagcgagacactgtctataaacacacacacacacacacacacacacacacacacacacacgcacacacgcacacacactgaatgcttgacaactgtctggtagagtcacttgtcatctcctgaacctactttcccacccgtgataggaggaagctgggctccagatggtcccagtgttcatcctgagctgcagagctctgctctgtccctgatgctctgagccctgcccatcaatcaggccaagatcagttctgtgctgggctgtatggcctggagcaaagagttagggagacgtggggcccagagtacctgggtgaccctgtcttgccttttcttctgcagatattgctgtgggagctccgtttgaaggcttgggcaaagtgtacatctatcacagtagctctaaggggctccttagacagccccagcaggtacagagagacggggatgggtctgctgcccccaccagccgagatgggccttccttgctttccttcacccaacccttccctgtagccccctgggccctgctccccagagcctgcccccaccactttcccctgcccccaggtaatccatggagagaagctgggactgcctgggttggccaccttcggctattccctcagtgggcagatggatgtggatgagaacttctacccagaccttctagtgggaagcctgtcagaccacattgtgctgctgcggtgagccaggaggccagtgaataagggtctttctcttcttcatctttgtctgcacagattcccatctgtgtccatgtttgcgctagctccttggaagcctgggccccaactctggcctggggcaggcaggaggcactgatatctgtctggctctgttgtctctgcagggcccggcccgtcatcaacatcgtccacaagaccttggtgcccaggccagctgtgctggaccctgcactttgcacggccacctcttggtgagattgttctgcccacctactcctcatttatttatagggaggctaggaggggctgcagctcccaaacccctcccctggcctcctgacatcccacctttagaaatttgattcttggggccagcatttgccctctctacccaacctcattaaaaagcaaaattccttgtaagaggtaatggatgaagtcgggggcagtagagtatagtggttcaaggtgggagctctggacggcctggttcaaatcccagctatgccagtgcaggggtggggatgggctctggaaagggggacgcatttaagtggatggatatggaggagagtctcctcaggtgaattattaatccctcttaggctcagatttcttgcttgtagaacagaattgataataactgattcacagggttgttgtgataattaaatgagaaaatatacagaaagtccttagcacagcactgtgtataccctaagtgctcaaaaaatgttagttgctaagaaagtgacagtaatgatggcgatgaccccaaggtctttaagtgaatgaggattttggatcagaagacaaaggcagacagagcagggaaatggggtggttggtgcaaggagacctggactggggattggccgacctaggttcaagactgggctgggccaccaactgactgaggacttcagacaagtccttctgggccctaggcctcagtttccccattagtgacctctaaccctgttctctttggctttaaggggagtggaagggaaggggtcagggacaccacagacctgctttgtggactccccagttttgtccctgcctctctccagaagggcctcggtttccttttgcccagtacagaggcgagagctagggcctggacgtgtgtgtcccactgtgacccgccctcctgtacatccctccaacagtgtgcaagtggagctgtgctttgcttacaaccagagtgccgggaaccccaactacaggcgaaacatcagtgagtgctggggtgcagcgtaaaaggggtacgctcccctgtccccttgctgaccaccctgtctacctgtagccctggcctacactctggaggctgacagggaccgccggccgccccggctccgctttgccggcagtgagtccgctgtcttccacggcttcttctccatgcccgagatgcgctgccagaagctggagctgctcctgatggtgagggaggagcaagggtcaggatgagggctcccaggtccctggaggaggtggccagtgtccccctagatcaagggtgagggacgggggtctccccagagacagaggttggggacatcggtttggaaggctattggtgtgtaggagtacagtgtacagcacccacacatgaggagtgatggagacccttggggtggggatggggccaaagggcttattacctccaaggaaagtgaggagtgtgggagctcttggctcagcccacctctgggaaaaggggtccctgagtagggagcaaggtcagtccctctctgggacatcagggtggaaggggagagctcaacctggagaccctgtggatggggaggtgaagggacttttgaggaggagaagccctgtctctcctcttggagggtcaggatagtaggaagtcgcaatttggcgaccggactggagggagttcagcctaactgtcaggttttcagggtggggggcgggtccagctcttctctggggttcagggtggtgtgaggattcagctggggcagggagcagtgcagggccgggctcagctcaccctctctccccaggacaacctccgtgacaaactccgccccatcatcatctccatgaactactctttacctttgcggatgcccgatcgcccccggctggggctgcggtccctggacgcctacccgatcctcaaccaggcacaggctctggagaaccacactgaggtgagtggggctggcgcctggactggaagaccaggggccagaagggcggtggggcgagagggcactggggggggtggtgcggccttcacacctccggccaccccccaggtccagttccagaaggagtgcgggcctgacaacaagtgtgagagcaacttgcagatgcgggcagccttcgtgtcagagcagcagcagaagctgagcaggtggctgtgggccgccggccgcgttaatcggccaagggtgggacggggcctcattaactggcagggtgggggcggggcctcatggcaaggcgagcccagggacagggctttagcgggaacaggtgggatggtcagaaacggggctttctcctccaggtgcgactagaggacggggcctggctgtcccaagatgggcttttctcacctaggagaccccaggggcggggcctagttgatccgggagtgccctgggggcggggctcttggctgagtcctgggctcctgctctcaggctccagtacagcagagacgtccggaaattgctcctgagcatcaacgtgacgaacacccggacctcggagcgctccggggaggacgcccacgaggcgctgctcaccctggtggtgcctcccgccctgctgctgtcctcagtgcgccccgtgagtgcccgccggccggctcagagcccaagcagggctccccgcgtctttgcatccccatatccatgtcctgtgcaggtgttgtcgtctgccacgtgcccacctcctctggtctgggccttcttgggggccttagcgtctctgctgcttggagaatccggctctcaagctctagggcttctgaccttgcaccacagaggagggaggacaagccctactttgacccgaccctgaccttattcgccttctttcctcagcccggggcctgccaagctaatgagaccatcttttgcgagctggggaaccccttcaaacggaaccagagggtgagcaccggccacatcctcccagtcctcctgggtccctggctgcacctctgatgagctccttgtccttccagcctctgcctgcctgctttctgggctccctcgaagtggagagccacagtgcgggaggagagactcagtagagggtgagaagaggcccagaaactaagacaaatggggctgctagggagctgtgcacaaagctagagcaggtggaggggaggaaaccagtttgaccaagcaccaactgtgtgccagcccctgagcccaacactgtgcttctttgatatgatataattctcacagccttctgaggaggtagatgctcttttacagaagaggaaacacacacttagaaagtttcagttacctgctcaaggttatgtagctcaaaagtagcagagatgtgacctgatggagagaaagggggaaagggaggcagaggtggggtggggaggtagagacccctcacccagaataggaggaggaggagaaggccagaaagccaactagaatagtgtgcatcccctccttccccatgacatcacccccgccaggccccatatgccactctctgcctccctgacccttgtggcagatggagctgctcatcgcctttgaggtcatcggggtgaccctgcacacaagggaccttcaggtgcagctgcagctctccacgtgagtgacctcgaaaagccagtctgggtcagggctgaggtatcttggatcaccttcctaacccctgcatttcctcccaaggtcgagtcaccaggacaacctgtggcccatgatcctcactctgctggtggactatacactccagacctcgcttagcatgtgggtaccgctctccaccacccccaccccagcctgctgtgcctaagctagggttccctatccccaagctatctcccaaactcctctgacccctctcttggcccagtgtcctcaggcctccactttccctggatcatccttttcttaacaacaacaatcactatcgttaccgttactattccccctgtaaagcaggcagaaatggaggaatcagcaaccccggggctaaggtgttgtccctaccattttataagagctcattgtgctaaggattttatatacatcatctcaatgacttctcacagcagccctgtgatacaacagctatgattaagtccattttacagatgaggagactgaggctcagagaggataaatagcttgcttgagtccataaagcttgtaaatgcagagctgaggtttctattgaggtgactgatgtcagaggggctatagttagccagctttggtgcccacccccctctgccagggccctggtctcttgtcccccgtgactccagcatccttcttacccctagggtaaatcaccggctacaaagcttctttggggggacagtgatgggtgagtctggcatgaaaactgtggaggatgtaggaagccccctcaagtatgaattccaggtaaggggctcgccagagtcctgggctggggacttctaggaaggattatttttattttctctggggtctgaaggtgggagggttgggggttggtaagatggaggtggttttccaggagataatgactatgacacatcttgtgcccacaggtgggcccaatgggggaggggctggtgggcctggggaccctggtcctaggtctggagtggccctacgaagtcagcaatggcaagtggctgctgtatcccacggagatcaccgtccatggcaatgggtcctggccctgccgaccacctggagaccttatcaaccctctcaacctcactctttctgtaaggacactatcagggatatttcatttgcatgctacagggcagaaaggccagtgtcttcccctccctcccctcatacccctttggcaagctgtctctcctaccctttcctttcctgcaaccctgctcccaattcttcctctgccctgccagcaaatctcctatttcctctccaggaccctggggacaggccatcatccccacagcgcaggcggcgacagctggatccagggggaggccagggccccccacctgtcactctggctgctgccaaaaaagccaagtctgagactgtgctggtgagtggccagggcgaggttggaggggattgcatccaccccatcacagggtgcctgggcaccaggggcacacaaagcaagggagacctcagtgtgatgaggtgatgaggcccctgctcttgggagcctccagacagagcagggagcctcatctcctgccctcagagggttctccactctgatgggggaggattgaagacaagggaccaaaggaggaggcactggctctgctccaaggaaccccagcctgttgggggcgatagagctgctcagagctttggccggcaggaggcggtgtcgggcagggcaatggtgggtggtgcgtgtgccctctgcaggaaaggagaggagagcgggcctggcaagccggttgaagcctagctgggtggagagtgggaggtggtgtcccaggggcagggagctggctgggaagcaggtgtaggcggttgggccctgtttacacaagcaggggccagattccatgttatccatgtgcctggcattatatgagcttggcccaaagagtgtgtctgaaatgcatagctgtgaggttgggggacgtgtgcatgagtgaaaggaagtcagacccctttgggtcacccaggggtgagacaaagcctggaaggggcgggaggtaaggagcaaggcatgaagaatctggagactcagactatgtcacgtcttgcgttccctgcccgcctcagacctgtgccacagggcgtgcccactgtgtgtggctagagtgccccatccctgatgcccccgttgtcaccaacgtgactgtgaaggcacgagtgtggaacagcaccttcatcgaggtcagtgcctgggtctgaaggtctctcctaccatccaccctgagggggagaacaacagggagagggcgagtccagggtcatagcatgggtgtgtgtgtgtgtgtgtgtgtgtgtgtgtgtgtgtgtgtgtgatttgcgtgtctttgcatggatgtgtatgtgtttgtccccagccaaaatgacctttctcgtgtccattattctgttatgtgtccattactgtcccacctccatgcctttccccagggtgttccttaaccctggaatgctcatttcccctcttttatctctgcgtgtaaacccctattttgttttcaaggtccctgtcagatgcttcaccatcagtgagctcttttctggcttttccagctgaaaatgacctctcttccaatggccacccacctaactttctcagaagccacacatgccatttatcacgctcgactctgggttgcaatgcctcacgtgcccactttctcatgccatctagaccaaactttttctgtacatgactagattagaaatcttttcaacttggcgggccatagagtttctgttgcaactactcagtactgccattgcaccacacaaacagccatagacaaatgaatgggtgtggccgtgcgccaaaaatacttcatttacaacagcaggtgccagtccagatttagcccacaggcctgacctagactgtgaccttcattgtttcggttgtccccagcatccagcacaggacctgacgcagaaatgaatgaacaaataaatgaatgatgcgcatttgtgtgtggaggggaggcctggctgacagatcctttggggtgctgtttaaggatgctacttggtgggagggtgatggggtgggaaagcttagggtcggaggtaggctcagagaagtgtcaagtgttccccttgacccaccccactcccaatccaggattacagagactttgaccgagtccgggtaaatggctgggctaccctattcctccgaaccagcatccccaccatcaacatggagaacaagaccacgtgggtgagtgcgcatgttcactaggacagcagtctccagccagagcttgagagtacagggcatcttttaagaggacactgacgcacttcagccatatggttctcaatcttggccacacggtaagagtatctggaggagttctggtgtctggactgcacccagagcaattaaccccgggtccctgggagtggattccgggattgctgtgtttaaaggtcccccaagtgatgctaatgtgcagccagggctgagaaccactgcattagcttccttgatctgcacaacgcctccatgaagagtagggctgggactgcctctctattttatggctgagaggctgaggcctagagagacttgagtggcctccccaaagtggcacagcttgtcaggggctggaacgtgggtctcctgattatctcacccattgtcacatccactatggacctgtgagcttcccgccacgggcaatatgtatgtatagagagaaaggcaggatatcaaggcagaatggagggaggttcagccatgagaacctggtgagtattgacagatgatgtcatcatctacgtggcagaaaagagaagcaatggaaaagctattattttattttattttgcttcagagatggtgtcactctgttgccccagctggaatgcagtgtagtcctgaactcctgggctcaagaaatcctcccacctcagcctcctgagtagctgagactacagccatgtaccacgatgcccagctaatttatttctttattcatgtatttatgtatttatttatttatttattttttgagatggagcctcactctgtggccaggctggaatgcagtggcgtgatcactgcaagctctgcctccctggttcatgccattctcctgccttggcctcccaagtagctgggactacaggcgcccaccaccacgcccggctaatttttgtatttttagtacagacagggtttcaccttgttagccaggatggtctcaatttcctgaccttgtgatccacctgcctcggcctcccaaagtgctgggattacaggcatgagccactgtgcctggcctaattttttatttttagtagacatgaggtctcactgtgctgcccagcctggtcttgaactcctggtctcaagtagtcctcccacctcagcctcccaaaacactgggattacaggtattagctaccacacctggcccaaaaagttattagacccaataagataattcaggaagtccaagaggtcaaaacaagatcaaaatacccaaaccccctaggtttcctacatgctagcaataaccaatcaaaaggatagttgaaaagatcccattcaaattcatcagaaaagtgatagagcatctgggaataaatataacaaatatgcagcaaaaacttgagaaatgattagaaaaaagtcaatattgtattatcaagttgtcagatcttccacccaaattattccagtctcagtaggattcaggaaacttgaaaaagaagttcccaatcttgaatctgagttgcatctagaagaataaatataaaattgctaataatttgttgtgaaaaggatataagtgaagatacgtgggagatacttatagggagatgaatgcagggttggttatgtacattattgtacatttcctaagatcaattaatgtagtatagaagaggtagaagaagggccagaaagatcagtggaacaaaatagaactttatggtacagatggcatttttaatctgtggagaaaggtagattattaagtagtgttgggagaacacatttggaaaataaagacaaacctctacttcacaacataaacaaaaatacagttagattaactatctacatgtagcaattaaaacctaacatgccaggatacaatatacagaacactttaatagtaacctttaattatgggaagagtgagttataaacccagaagtcacaggaaaattttgataaattagactctatgaaaatttaaatctgtatacagcaaaagagatagtaaagaaactaaaagaggctgggcacggtggctcacacttgtaatcccagcactttggagactgaggcaggcaggttgcttgagcccaggagttccacattagcctgggcaacatggtgagaccttatctctacaaataaaaacaaaaattagctgggtgtggtggtgcacacctgtagtcccagctacttgggaggctgaggcaggagaatcgcttgagctcaggaggttgaggctgcagtgagtcgtgatcatgccactgtattccagcctgggtgacagagtgacatcttgcctcaaaaaaaaaaaaaaaagaaactaaatgggcaaatgatatactgctttttaaaaatgtttacagcatatatgacaaaatattgatatgtattttttaatatataaaggatatcaattggcagcgtacatagggtgaaatacaaatgttcatcttgctcataaagaaatataaatcatagcaacaagatttttcttgcctatcagattgggaaatattaaaaaaaataatgctggccaggcgctgtggctcacacctgtaatcccagcactttaggaggccaaggcgggtggatcatttgagttcagttcgagactagcctgggcaacatggtgaaaccccatctgtattaaaaatacaaaaattaactgggcgtggtggtgcatgcctgtaattctagctactcaggaggctgaggcagaagaatcgcttgaacctaagagagaaatgtagtgagccaagatcactccactgcactccagcctggacgacagagtgagactctgtctcaaaaaaaaaaaaaaaaaaaaaaaaaagaataatgctgtctaatgctgatgaggtggagagaaatgctattgatttggatgataaattggtagattcttttaggagacgaagttttcagtatctattaaaatttaaagtgcccatttccttagatccagtacatgagaatatattgtaaggagctaataggacaagtatacaaagataaatatatggggatattttagataattatttataatggcagaaagttggaaacaatctaaatgtctttcagtaggagattggttcaataaattatggtacatttccttcaatgactgtgcagtcctcagaagagattaggctgatctttaccaattgacgtgaaaagatgatgatattaagtgaaaaaaaaacaggttgctggctgggcatggtggcttatgcctataatcctaacactttgggaggccaaggtaggaggatcgcttgagcctaggagtttgaggctatcctgggtaacaaagtgagacccatctctacaaaaaaaatcaagaaattatctggatgtggtggcacatggtcccagctacactggaggctgaggcaggagaatcacttgagcccaggaggtggagtctccagtgattcatgtttgtgttattgcactccagcctgagcaacacagtgagaccctgtcttaaaaagaaaagaaagagaccgggcgtggtggctcacgcctgtaatcccagcactttgggaggccgaggcgggcagatcacctgaggtcaggagttcgagaccagcctggccaacatggtgaaaccccggctctactaaaaatgctggggtggtggcgggcgcctgtaatcccagctactcaggaggctgaggtaggagaattgcttggacccaggacacagaggttgcagtgagccaagatcgcaccactgcactccagcctgggcgacagagtgagactgtcttaaaaaaaaaaaagaaagaaaagggaggaaggaagagagggaggaagggaggttgctgaagggtgtatgtgacatgatcccatttatgtagatcatattaatattccatatttaaaactatggaaagagattcaccagagattacagagatcgtaatttctagatattaaaattactgggaaccagctgggcatggtggctcacgcctgtaatcccagcactttgggacgtcgaggcaggtggaccacttgaggtcaggagttcaagaccagcctggccaacatggtgaaacccgtctctagtaaaaatacaaaaatgagctggttgtggtggtgggcacctgtaatctcagaaactcaggaggctgaggcaggagaattgcttgagcccaggaggcagaggttgcagtgagccaagattgtgcccctgcactccagcctgggcaacagaatggaactctgtctcaaaaaaatatatatattatagatttataatatatattagattatacattatagatttataatatatattagattatacattatagatttataatatatattagattatacattatagatttataatgtatattagattatacattatagatttataatgtatattagattatacattatagatttataatgtatattagattatacattatagatttataatgtatattagattatacacatatagatttataatatatattagattatacatattatagatttataatatatattagattatacatattatagatttataatatatattagattatacatattatagatttataatatatattagattatgttatattatagatttataatatatattagattatgtatattatagatttataatatatatagaatatgtataatatatatattagattatatattatacatgtataatatatatattagattatatattatacatgtataatatatatattagattatatattatacatgtataatatatatattagattatatatattatacatgtataatatatatattagattatatatattatacatgtataatatatatattagattatatatataactgggaacctttagttttctttatatcatctgtatttttaaaaaaatcatcaaaataattttaaaagaagtgaaaatcatgtatagtcagaacaaacacggctgggcacagtggctcacacctgtaatcccagcactttgggaggccaaggcaggtggatcacctgagttcaggagtttgagaccagcctggccaacatggtgaaaccctgtctctactaaaaatacaaaaattaattgggcacggtggtacacgcctgaaattccagctacttgggaggctgcagcaggagaattgcttgaacctgggaggcagtggttgcagtgagccgagattgtgccactgcactccaccctcagcaacagagcaaaactccatctcaaaaaaaaaaaaaaaaaaacctcatatacacacacatccgtatttatctccattgtaggggaagaaaaagaatgggactatcagccgggcatggtggctcacgcctgtaatcccagcactttgggaggccgaggtgggcggatcacctgaggtcgggagttcgagaccagcctgaccaacatggtgaaacctcatctccactaaaaatacaaaattagccaggcgtgatggtgcgtgcctgtaatcccagctactcgggaggctgaggcaggagaatcgcttgaacctgggaggcagagctggtggtgagccaagattccaccattgcactccagcctgggcaacagagcaagactctgtctccaaaaaataaaataaaataaaataaaataaaaagaatgggaatatatgctatgaattctttgtggggtttttttggtgaatatttatggagtgtttgctgtgtagcaggtgttgctctaagcagttttcttatatcaaacacacttaattctccccagcaacctatgagagaggtaatattcccattttacagatgaacaacagagaggttaagtaacttgccaaggccaaacagctcgtgaatagcaaacctgggctagaacccaggtaatgtggctccagaacccctgcttttggtcgttctgctattctatgaggtagtcattatgatccccctcatcagaaagcagaaagcatgagattcagaggggtgcaattacttgtccaaggtcacacagctcatcagggaaggagctggtacccaggcccagatgtgtgggtcacacacccagactccaggccacctcccagatctgaggccgctcctctggagtcaagtctgtgcctgggagaagcaggaaggaccactggacctgctgtcagtggggcaggcacaggctttttccagtcccaggctgccccctactggcagcaggacaaacagcaggtgcctgggcccagctaggataggaagggtgaggatgggcctaagcaggctgacacagggctgagtcctcctctccccgctccagttctctgtggacattgactcggagctggtggaggagctgccggccgaaatcgagctgtggctggtgctggtggccgtgggtgcagggctgctgctgctggggctgatcatcctcctgctgtggaaggttagtagcccagcccactcctgctccgggacctccaccagcacactcaccagcccttcctccaacccacgtctccccatcctggtcctcccttccatctcacccccacccttcctccctgtcctctccaccttctaccaccagcttacagtctcacccctggcctgggttagtggggggagctgcaagctggaaagggggacccaggagctctggcttctgaccacaccaccaagctgggactgagccccagcccccaggctccccagccctaaagccctggtccacgagtgctgctggtgaggatagcccagcgcccccctgatggcccgtccccacctcctcccctccgcagtgcggcttcttcaagcgagcccgcactcgcgccctgtatgaagctaagaggcagaaggcggagatgaagagccagccgtcagagacagagaggctgaccgacgactactgagggggcagccccccgcccccggcccacctgggtaacacggcctccgggcccccttccccgagccccacagctggccgggcctctgactctgtcctatctgctcctcttcccttatgggcctgctctgacctcattctgtccccaccaccaccccaaagatcaggtcactctgactgtccctccagccccctgggtgtctggctttcatcagcctccccctaagccccttggtgacttgggaccccatgagggaggcataaatcctctctgtgatgaccttgctttctggggattggaacaaggtcaagggcaaggccaggccccatctctgtaaaccacagccatgtccagaataattctacactcccatttccacccctagggaaggaggggagcagtagagaccctcctcctgggaactagcctgtttcctcctgagcaacccttccaggataacaaatggacccattcccaacattgtggtcagggtagactgcccagtcttcctggccattccatccactgtctctgcagctgccctcggtctccatctgcctcttcctctgctctctgccttcctcaactccttcttcctctggggcctggggtggagaaactcatcctccgtatctcagtgcagagagatgggatgcgtttcggtcaagagttctggctttgaggagttctgggtgggagagggagaggcctggcactccttcctggtggctcaaactctggatgctaatgttctttctcttctccctccaactccagtgtgacttctttaagcggacccgctattatcagatcatgcccaagtaccacgcagtgcggatccgggaggaggagcgctacccacctccagggagcaccctgcccaccaagaagcactgggtgaccagctggcagactcgggaccaatactactgacgtcctccctgatcccaccccctcctcccccagtgtcccctttcttcctatttatcataagttatgcctctgacagtccacaggggccaccacctttggctggtagcagcaggctcaggcacatacacctcgtcaagagcatgcacatgctgtctggccctggggatcttcccacaggagggccagcgctgtggaccttacaacgccgagtgcactgcattcctgtgccctagatgcacgtggggcccactgctcgtggactgtgctggtgcatcacggatggtgcatgggctcgccgtgtctcagcctctgccagcgccaaaacaagccaaagagcctcccaccagagccgggaggaaaaggcccctgcaatgtggtgacacctccccctttcacactggatccatcttgagccacagtcactggattgactttgctgtcaaaactactgacagggagcagcccccgggccgctggctggtgggcccccaatgacacccatgccagagaggtggggatcctgcctaaggttgtctacgggggcacttggaggacctggcgtgctcagacccaacagcaaaggaactagaaagaaggacccagaacggcttgctttcctgcatctctgtgaagcctctctccttggccacagactgaactcgcagggaatgcagcaggaaggaacaaagacaggcaaacggcaacgtagcctgggctcactgtgctggggcacggcgggatcctccacagagaggaggggaccaattctggacagacagatgttgggaggatacagaggagatgccacttctcactcaccactaccagccagcctcagaaggccccagagagaccctgcaagaccacggagggagcgacacttgaatgtagaataggcagggggccctgccccaccccatccagccagaccccacgctgaccatgcgtcaggggcctagaggtggagttcttagctatccttggctttcagagccagcctggctctgccccctcccccatgggctgtgtcctaaggcccatttgagaagctgaggctagttccagaaaacctctcctgacccctgcctgttggcaggcccactccccagccccagccccttccatggtactgtagcaggggaattccctccccctccttgtgccttctttgtatataggcttctcacggcgaccaataaacagctcccagtttgtatgcagctgcatctgcttccacccactccccagcctttaccaaccccaggtcaatggatgatgatatcatccagccaacacctaggtaggatgaagccaggtctggggacttgcgggtttgagggtaaagattgatggaggtggccaggtgcagtggctcacacctgtaatcccagcactttgggaggccaaggcatgcagatcacctgaggtcaggagttcaagaccagcctggccaacatggtgaaaccctgtgtctactaaaaatacaaaagttagctgggcgcagtggcgcatgcctataatcccagctacttgggaggctgaagtaggagaatcacttgaacccaggaggcagaggttgcagtgagccgagatcgtgccattgcactccagcctgaacgacagagcaagactctgtctcaaagaaaaataaaaagattgatggaggtgacactggcccctgctctcaggaatcctctcatctaagggtcagtcatagagatccagaacagaagatgaggggtaagccttgggagacctggatgaaacccagaacgccttcttggaggacagcgtgctgaccctggggagggacgagcaggcagaggtggcagtgtgcagggtcgggaagaggtaaaagctactcagctgtaggaacaggcagtcctggcaggctgtggagggaggctgggtgcaagggtggagagaggagagcccttagtcgggctgaattcaggtaagagcctgctttcctgccttggtttccccacaaccaccaccagacgccaataagagatcagaaggtaaaccactgatccaaggctgcagagactgaactgtcacaaggtccagcctccaggagctgagagctctggtctttcagaagctccttgggagtgtttgagcgcctggcttacatggcaacagcacgtggatcaagccttcgctttgcttcctgccatgtcctgggttcccaaagcagcttcctcctttgccctcggtttgtcccctccacacaggcctggggaatggagtaaggctgttccccctgtgacctggaatgtggcctaggtccttctgttaattttccttaaggctgtgaactttggcaagacttcactggaggctggaaattgctacccagagaagcgcagaggtagaagccaggtcagatatgctcagagctcacagacccaggctgttctgggagacccacctgatgcctgggtgcctcccagcctccttgtggtggcagctgcctgccccacctccctccaccagcgctcagctcacaacagggttctgggcccaatgtccgcccctttccctctcctcactttctgtgccgggatttgccccttcccagggtgactgacaatggaatgtccactttcccaaggaaaaccctagcccctacccggagctgccaagctctcagaacccagtgaatggagaccacactttattttctagaatctgggatccagttctttgggcataacatgtgtgggttgtcaaagctcggcccagtcttgtccttacagccacttcctgcttaagacaggggtgttgacacatccctctggccagtttcacagaccccctagtctcctgtgagccactgcttgaggaagaccccccccacacacacacacactcttgaggataggtcattttcagaactagcgtgagctacatattatgaaagaaacataactggcagagatatagcaatgcccactgtaaaagaaccctctgcaatgccaagtttcttgagctccttggagagtccccccccaccaacccacactgtacatatagtgggagatttgggaatcggtgggggtgcagtttacctcggcatcacctaaccaaacttgactatgatgtaccacatcacaccactgctgttagcaccctgcagcaggctctgcagaaagagttcttatccaagcacagagcccacattatggaagtccagcctaaggtgagggtcatgggaaatctctttccctctcctacacctagccttagaggccacggccttttccttgttactttaattttgacaataacagcaatagctaccatttattgctaggcacagaaataagcctttttttttttttttttttttttttttgagaccgggtctcagtcagttacccagattggagtgccgtggcacaatcatggctctggctcactgcagccttgacctctggggctcaaggaatcttcctacttcagcctcccaagtagctgggactataggtacatgccaccacactcagctaattttatattttttgtagggacaagatcttgctatgctgcccaggctggtctcgaactcctgggctcaagcaatcctcctacctcagcctcccaaagtgagggccaggtttttttgtacataatattctatatattattctgtgcacttgaaaactgcactcaccagcatcatcaatcacgtcctaattgctagcccagtggatgtttggtggttctctggaatatctctgtggtgtgctcctctgcttgccctgtcttctttttcaccctgtcctccctactaggtgctgagtactgcctgatgctagagatagggcagtgaataagacagatacaacccctgccctgccctcacggagcttaaagtctagcgggaaaacagatcagttggcaaacaattttcactcaattgataagagctaccatcagctccttttaacccctccttcctggatttgtccaggtagctttcagccaatccctttcctcgacgaggtacctgtttcacatgtcctgatctttccttgtcctctcttaaggggtcttgtggattcccagtctggatgacagtgacccagactgcgaatatttgctaagaccaggagatctaaggagcccttgaagggagcctataacccagcttggcaggatcaaggaaggcttccaggaggaagggatgactaagcagctgagacctgaagaatgggcaggtgaaggtgggaagaaagaatgatccagacagaagagatgcatttgcagtggcttagagattagaggctggttcaaggcagcagacaggtatggctgggagctgcatgggggaatgtagagagaggagtctggagaattaagcaaaagtcaatcgacttgtgacaactggaaaggctccagtaagaagaagagagccattgatggcctagcacagtgcctcatacctgtaatccctgcactttgggaggttgaggcgggcagatcacttgaggtcaggaattcaagaccagcctggccaacatggtgaaaccctgtctctactaaaattacaaaaattagccaggcatggtagtacatgcctgttatcccagctacttggaaagctgagacaggagaatcgcttgaacctgggaggagaagtttgcagtgagccaaggttgtgccactgcactccagcttggacgacagagggagactcaatctcaaaaaaaaaaaaaaaaaaaaaaaaaatagcccattgaaaggctgtgagcaaggaagtaataaggtcagatttgcagttgagaatgatccctgagtctcggttttcttatctatgaaatgaggctaagaataataaaatagagaattaaatgagataatgcctgtaaacagtgcctggcatatagcttattattcatccagctaagaggcccttccatatgtgaagctttgctctgtgaggtctgtattacaatcacattcagttatagctaattatttacttatgtagctatctctgaaacttagaaatgaaatcatcgaggaaaaaggccatttcttgatcctgtctgtgttccctgttcccagcataaagcctaacacgtattaggctaatgtcaccgagcaaagaaagcatcaaagtggcgggtcgggccctaaacccacgatgggagataccacattcggccacaagagggcgcgtcacattttctccaagagaagctgggccgctgatgaaggacgggctccgggcctcccagagacacttcacctcctgggatcttgctctaaggaagcccggtgcgaaggaggtggctttctcaggtggtcgcgctagatgtccaaggctttatgttcggtcagatgagctgtataataaaatgaaagtgttaactggcatggacgatagctgctgcctccaccgccactagtagtgatggtttttactctggatgtttttcagttggaaaagcaaactccgccttttcctgagccgcttggatctttgtggaagcgggtgggctgcatatatacaggacggattcgtataggcttgcaccctggttccgaattttgcaaatattcgcagtctgggtcactgtcatccggactgggaatccccaagacccgttaagggaggataggtaacgatcatgacaggtgaaacaggtacctttgagttggagaaaagggattggttgaaagctacctagacaactctggaaaggaagggttaaaaggagcctgcaggtgaaggagatgcgagggggtagcaagggaaaggcaggcgtggaagaggaagcgaaagggctggcggggctctgggaaggaaggggttaacccgggcttcgccccgcggaggaaagggaggagtgaacacaggggaggtgggaactcggcgcggcctccccaaaacaacaggccgccccggcaaagcgtgggttaagggggcgggcccgggggaagccacgtgccggggcggaaggctattggttcgcccggagttgtttgtgagtggccattggcgacgtcgaggcgccatgacgagccgattggctgggcgttggaatgcccgccagggcaagggtagggaggaggcggccgaaccgcgtcgctgggccgaaaggtgcgcgagcgctgcccgcgcggggaccacaaccaaagtcgcggccgccgcagccatgcgctgggtgtgggcgctgctgaagaatgcgtccctggcaggggcgcccaagtacatagagcacttcagcaagttctccccgtccccgctgtccatgaagcagtttctggacttcggtacggagtgggcgggaggcggctggcagcggaggccggcggggcgctgggaggggcagccgggggctagggggacggaggagaagaaaggccccgagtgacagagaagggttgtttggaaaggtacaggcaggaaagagttaatggggaagcaggaaccggccggggcctctcgacggggctgctgatgggaatggggggcatttacaaggacggtcccgaggtttcttcgtgggcctcatgaagggtcttgaagagtaaggggcagtgaagctgtgatgttactgcaggaagggagtagggtggtatccagacgcgaaagggttaatgggagttgtcctcatgactggaggagtaggggcccctcctcccaccagaggaaaccgggggtctgctggtgggagtgaggaggcagggtttagaggtgcagccatctgtagagagacctggactgggcatgaagggtcagacacccctgggcagagggtgagattaagccaggggcagttggggaagggggctctttcagaagatgccattgggagacagtgccctgactggtagacatccacccacagaaggagctggaccctagctgccccagtgggcaaggacacttgaagatcaaatctgttccggcctggcagcctctccccagctgggcaggggccccaggcaccgtgatgtggagtcaagccgcctatacctcccttggctgccccagggctgctaggtcaggatcgcccactaccagcaacctgggggtggccctggggcaggagggaggctgtgccaacgtggcagctgaaatgggcattgtgtgggccctgtctgtctatgtggtatttccatggtgccagctggggactgggggtggggggcagtctctcaagagttgagttgatagtgcctagcttgggttgcagctgcgtcaatgatgggacgggaacagagaggtggcagccgagacataaggcacctgttcctcaggacttgtctgcctgcacccctgccctgcctgagtcttgagcctcccccatgtaggaaagcctcctgggcccacccctagcccccagcagctgtccccacaaactgcaccctaattacagaaacatcacagctgtgaggggctcacagtagagtttggtcaacttgtagtactatgggggaaactgagaccttcaaaaggatgatggcatggcctgggtgacagagttggaagcagagcctgatggactggaacccagggcccctgaccctgggccaaggccatattcggtcccccaccctttccatcttgacaccagacaaggaccgaggcatttggactcctgttctcaggcccgtttgccccatggatgggcattaagacacagcagccccacatgggcattcaggccaggctgggtgaggtgggctggccagagacaacactgggagcctgcagtggtggtctagccatagcccccctcagccagagcccagtcctaggtagggatgggtttcccaggctcctttgtcccctggaatcagcccctcaaagtgagtgtgctgggagggaaggaaagagaagtgaggtgactgaggccagaggcagctccaaatgggcccaggagtggccctgtccactgtggttaaaggcaagcagggttcagctggggatgaggagaggatgacacctcctgaagtgttaggcatggggtgtaggtgtttgagccctgcaggggatggggagccttgctgtgtgccccgggcaggtcacttgctctctgagccccctgttaatgaagggtttagctgacctggccgagacatcctttggctttcatagtctgtggctctgtggctcacccctctttctcctgccaggatccagcaatgcctgtgagaaaacctccttcaccttcctcaggcaggagctgcctgtgcgcctggccaacatcatgaaagagatcaacctgcttcccgaccgagtgctgagcacaccctccgtgcagctggtgcagagctggtgagacccctggctcagtccctgcacctcccactccatcgccagtgtccctgggctcagggatggcatctccaagcttttagcagctttgagggtggggtggggacagacaggagacaccaaagccccaagcgcttggagttgcctagggtcacgtgggaatctgaggccagagcaggactgaggtcaagctcctagtctctgtgtctagccctcttcttaccacccacctttctctggaaacacaggatccacctaggaaagcatggttttcacagccaaaaccccaattcaggctgatgtcagcattagccagcagcccagacctggaactccagtaactgttaggcagtatttatttgggggtaactttttgggaagcagaaacaagaagtaagttttcaaatacattatataacccaagctgcaagacagactgttttggatgttggaaaatactcagatacacacaaggatggcacagtaccttcccgaagagctttggaggggcaaagaccaaacgtttattgcgcactgcagcaggaacagagggaaaggctcagcagagttcactcaagaactcaagttaagtaactggatgaaattagccaaaggccagtcacgtgaagaataaacaagggtgtcccttgtcactgggcatgtaaatagctaatcctcattgactttggtggcacccttgcagaaatcttgggctggttcttttggacttgcagtatgatatagttgtgatttccctgtagactgaggagcacgtgcccacatgtattctgagctcaaagccatgcgaagtcacagcagctgccctcagaggcctgtgatcttgagggaaaaataatattcacccaggcagggtgaactgagtccagcatagtgctaggagcagggagctgccaaagagttcgttttatttaaattaggaatccaaacattattttaaaagaacactgatatttttccctcattgtggaagtgtaacaggttcacttgacacttgcaaaatgcacaatagtagatagaagaaaatgccaaccactcccctccaccccctaaccgaacacagttcagtttcgtcagatgtagtggtgcctttccagcgctgttttctatgcatggacctgtggatatggggcttattctaattaaatgagatatggtgaggggcagtgttgtacacacaaggctaggggtgtagtgggtgcaccatgaatgtttgttgaatgacacgttgtggggcagttgctatggacatgcagaggaggtgacttgtcactggaccttacagggtacctaggcaagctgagagctaaaaggaagggaagggcattccaggctaaaggaatagcctgggcaaaggtgtggagacaggaaggggcctggctaagggagctgagaactgactttctggagattgtgctgttagtgtgggctgtgaggaaggggtggaggcatgaggcacagagcctgatcttcatggagcccaaccaggtcaccccttgctgtgccttgcctctcggaggtccaggacctctgagccaaccaacacttcccatcgtgggtggtgtggagtggtgggaaggagacagaaggtaccatctgttctccctggccctcctccggctctatccggctgcctgacctggctgcctctccacctggtccctgactccagggcaggacttctcaggcccctccctggacaccgtgttcctgggagagctgagggatgcaggaggagggcaggggcctgctgagcttcccatgactcccccaggggcccctgcagagtcccttcctgaaactcagtgacacagataagaggttggcctgacttattcttccgcaaagcttgcaagtaatgtcaagtaacagcaggagggaatgaagttagacaagagagaacacttcctcaatgaaggattcagcttaggccgggcgcggtggctcacgcctgtaatcccagcactttgggaggccgaggcgggcggatcacaaggtcaggagatcgagaccatcctggctaacacggtgaaactccatctctactaaaaatataaaaaattagccgggcgcggtggcgggcacctgtagtcccagctactcgggaggctgaggcaggagaatggcgtgaacccgggaggcggagcttgcagtgagctgagattgtgccactgcactccagcctgggcgacagagcgagactccgtctcaaaaatgaaagaaagaaagattcagcttagaggagagcaggccgagggattgctaaagcatcccaacgcgctgaagagacagcctgccaagaatgtttccagagagaatgagcattggctacagcaagagagactgaggtgtgaagacaagaaggacttcccgacagggttgaggtggctgcctgtaagagagtggagacctctttctccaggagcaacagcctgccagctggaatgatggagatgggcaggttctaggtgcctgagaggaggggggagactttaccagggagcttggcaagagggcctctagcctgagtttgatgagtaagaagcaaaccctcctttctggaaaacacaagagccctcggcagatgcagttattagtggtcatggttcatctgtggtcatagaaatggagtttctactcagctggggagaggttctaggcagagtcactgggcaaggtgagaattcctggttctaaataaacctgatacatttcaactggacagacttgtgatagtgggccctgttttggtggagactggacggggagggaaagtcccaggtttggcctcagcatgtgtgactttgaagcttcatcctgggcaagccacatggcatctctgagcctcagcttcctcatgtgtaaaagggggacccattgtgtttgtaagggccaaaggccagtgctagatgtgaaaagtgtgcagaactctaccaatacaaggcatatccccaggctgccgggcagcaacacctccagcccacagaggatgtaattgtggtgtggcttcttgggcaaggtagtaataaatcatgataataacaaaagcaaacacctccaaaggctggctgtgtcccaggagctgtcctaagtgtctacgcgtattaactcatttcatcttcgcaaccttatgaggtagtctttgctatcatcccattttctagatgagaaactgaggttcagagaggtgaagaaccttatctgagatcacccagggactaggtggtggaattgggattcgaacccagctgttggatttggagactggattcttgaagggaaaggagggagcctgcactctgggcagtgatgtggagtcagagatttccaagttcatggtgcaagtctgtgggagagcagaactcactttacaaaattgttgacagccggtgttgttagagacggaaagggacaaccccggctcctctccaggcgtggagtctgtggggatgtgcttccagaaaatgcagggttaagcaggagctgcagagtagaatcaaatgacaatgactcactgctgtcactaacaggctctttgtgggggctgtaggtgggaggcgatatggccggcaccttcgcacaaacctcccttgcccgtcagcaaggtgtgtggaccccatacagggggtgtggcttgggtgcccaggacctgctaaagccacacgagctctccaaacccgtcagccgctccttgcatgaccgagcaggaccgaccacttactgcgcatgtactcgaggcatcatcttttctgtacacccaggcccatgaggtgcttactcccatgaaccccattttgcaaatggggacccgagggactcggtggcctctttagggcacaatcagcagcggaacccaaacctgcctggctcagaggctccggaggcgggacaccgccacctctcccccaagtgcagcgagcaccctcctccccagcctttgccttgtttacaccctgctccccagcagctgtggatacgagtgcacagggcacaccctcgcacacacccacaggcatgcacatgccacatgcacacaattacacacactcccccgctggctcagcaccccctctgctcccacacagggctgcagggccctcctcccactcactcaccctctcctcccgcccccaccgcccattatcagccccacactctcagcaagcctcctggcttctgcctgcatccacccctcctccttctcattcctggggctctggactggctctggagccctggaaagcagggtttgggtggatctccacattaccttgggctgggcttgggagctccggatctcaccaagggactcctgggggccttgattactgcagaggtcagcaggcccagagaccccagcctccctgcaggtcctggggaggggtgggggcaatgcctctcccgcctgttggtgcctgtctgtcactgcaccactgcttcaggcctcccttatataagcccagttctctctctggcctgcaaggggtgggcagcccagaggccagcgccactcgtccccaatctcccttcttaggatcaagaaccggcccaaggttgacatttggtgcaccaggcccctgaggggcttcagggcaaggccagggacctcggggaaaatcctcatcctctcccctccattccaagagtagcctgggccccttgccctggaggagccctggccctgtgagggaggctggcaggcgctgcccgctgtcactccatgccggtgccctttgctccacttcagtggccacgtgaccaggccccattcctgccctctagggttgttgagcagccacaaaaggggtggtgccagcagctggggcactctccctaagtgagactgggactttgaccatgcccacccccacccactgcccagcacagtcaggaagtggcttagcctcccagctcccacccgcttcatccccacctgcctcctgggaaggggcctcaggccccactctgcagtgggtctcctccccctcctctccccacctgcccctagcactgcctgtgtgcgggccctctctcccctaagaatcatatgagcatgaaggtctattttgggtgcgtttagggagcaagggattcggagccacataggcctggatgagagaatctcagctctgtgtgttaacttcctcatctgtaaaatgggtccagcagtagcgcccacctctggggttcttgtggaggtgaaagtggggcaggagggaagcacagggtggacctggctattggtacccagtaaatgccaccatcaccatcagcagcggcatcaccgtcagggcccgtgttggccgttggccacgtggtgtagacttggagtctgcaagagctaggtttgaatcccaacctgctgcttactatgtggcctggggcatatcactaacctctcagtgctggtctcgttgtctgcaaaaacagggaaataccttgtgctcatcaaggctgttggcagatgagagaccctgtgtgggactcggcacaagtgggtgttagtggtcgctatgttcttctccagggagacaggtgaggtcttaggagtgccagcctgattgtctgctggggtggcagggatggtgatgggggctgagagaaaggctgatcttttctgctgttggggcccccagccccatcagcagccacagctcctcctatcgggctctgtgcagagctctgggtagggaggggtgggcggtgagctctgggcctgagacagcccccttcgtgtggcagtggggcaggtctccagggcacaggggctccaacatgctgtgattcagagcctacaagcagtgggagagtatcagatgctgcctgggggctcagaggatgcatgcagctgttgacagtgtttgagccaccagccataataagagcaagcattagagagtgctcactatgtgctaggcactgtgctaatcatcacatggaattctcaccacaaagcagtcataaatagatataacaatccccattttcctaatgagcaaactcaggcccagagaggttccatgacttacccagagccacacagctccaagtgcttaaagagccaggtctgggtccagagctggttctttcactctcttctctgtcaggcaagagcgagaagagcagcaatactaggtttaaggggaagggcattcctagcagagggcactgtgtgaacagaagcgtggaggtgagagtcgagcagaatcagcactctggagtggcaagagcgctggagactcgggggcttcatcatcccacttactagctatggggctgcttacgcctccctgggggaggctgtgcgtggggctgattcctgcctgtctgcctgttacaggttacagtgaaggccagagcactgtggacatgggaatgagtcctcgtgtggaggggccttttctagaaatactgttgggcccctggggcccttggcactgcagggctctaggtagcgcccccccttcctcctggttataagtgtttctgccagagagaggctcttcctgccttccccaaaggaacaagccacagactggacatgttagcagggaaacaggtcatggctccccagggcacggggcacagtggctccagcttggtaccatctgccaccacaggtggacctgactcccttgcagaaggaggcctgctgctgtccctgagttcagggcttattttttggggggacagagtcttgctctgtcacccaggctggagtgcaatagagcgatctcggctcactgcaaccattgcctcccaggttcaagcgattctcctacctcagcctcccgagtagctgggattacaggcgtgcaccaccatgcccagctaatttttgcatgtttagtagagacaggtttttgccatgttggccaggctggtcttgaactcctgacctcaggtgattcgcccacctcagcctcccagagtgctgggattacaggtgtgagccaccacacctggctaagttcagggattcttgatgctccttttagagcatcaagctcttctcttagcccagggaaaactggcctccccatcaggcctgtagatgggaggaggtggcagggcatcacccactgctacctggccttttgcagtagagtgagcttctctggactctccatgggccccagccccacctggggacagagccaggcacgcccaccccacctttgggtccttcccacctgccattttagaatccacttgccgaggcaggtgcctggcccagatcaccccagctcaggggtcactctgggaggccccgtgctgtctcctctgccgggggtcactccaggaggccctgtgctggcccttctgccattgtgcccactggatgcaacaacaccccggcggggagaaacattaggagctgtttccacactggggctcagagaagttgatgcacctccctgccttcccccactgcaggcgctaggtccagtctccctgccccatctcagcctcagtctcctgatctgtgagtcctcttagatgggatcatctccaagccccttctgagaggactattctaggattccaaagcaaaggtgctaaacgggggaccagcaaatttgaagttttcttgcataactgactgggttgtcagggagactcacatacaaatgaaatggatggagaaaaatagtgaggcggcttgtcggcagctctgtgtggggcccgcgtaggagcaggacaagagcaaggcccagttgaatgaagtgggtgaggaggggctagccacctgaagctgaggctgtgtcccctcccgcccccacacaggtatgtccagagcctcctggacatcatggagttcctggacaaggatcccgaggaccatcgcaccctgagccagtgagtgggggccctgggtggggcaggaaggcaggtgttggccaggggcatctggggttgcagcccctggggcagaagtacagcaggatggaagaaaagacccctgccttcagaaacatccagtctgagtggggagacagactctgcttcagggagccccaagtttgatgggagagacatggactccattctcactgttccctgagcccggtgggcaagacccaggccctgccatggggaggatgagaactctgggctttcgagtgggaagcctgccggcaggcagctaaaagatcagagtgggctttgggaggagcagggagggcactgggagtccatcggattgggaagggtagagcgggtgaagacaccgtggagaggggagtcagaagcggagaagagtctgggggtgtcccatgtgaacatctgccctgccccacaggttcactgacgccctggtcaccatccggaaccggcacaacgacgtggtgcccaccatggcacaaggcgtgcttgagtacaaggacacctacggcgatgaccccgtctccaaccagaacatccagtacttcctggaccgcttctacctcagccgcatctccatccgcatgctcatcaaccagcacagtgggtgccggccacagcggcggggagcgggcggtggggggggcggtgctggggcccagggccgggctgctgaggggacctagaccactcttcagaaccccacaaagggagtctttgaatagttactccagtaactatggagttaatggctccaacatggaaaaataaaatttttctttctcattgattttccatttcaaaacgttttgttttcagtgtttgcaaaatgtaaaattatgtcacatctttaaaagaatgtttaatttagtatttataaaaactctcattatgttcaaaaacaatttgttgtttagagtttcttattccaggaggattcactatgatttttgagaagttgtagccagtcataaattaaacaagttcctcatgctcaaataatttccaaagcaaggtggtaagagttctcttagaatgttatagtcaaagaaaagaataaatgcaatgtggagatgtgatgtggggagagacctctgaaaagacgtctgtttcaggtttgcaaaggtttaaaaacggcctaagccagggctggaggggtcaggggtcagggaagggaggacagaagcgggggagtggggcagctttaggactggagcctacagaggcattggaggtgaaagtagaaagaggaggaaagcccgggggaagagggagcgctgggacagactgcagcccagccaacagcatcctcccttcctgcctgcagccctcatctttgatggcagcaccaacccagcccatcccaaacacatcggcagcatcgaccccaactgcaacgtctctgaggtggtcaaaggtgagccattcccacggtgcctggcccgcagagaagccccggggacccctccaagcttacctggccagagggtgactcgttcctcagtaaggggtgccatggatttaatgctggtggtccccagtatcaatgtcaggaggactgcctgctgggtgggccacccatgccctgaatgaccccatcttctctcagatgcctacgacatggctaagctcctgtgtgacaagtattacatggcctcacctgacctggagatccaggagatcaatggtgagtgagcggggctgtgtatgtgtctgtcttggggctggggacgtggcagggcaaggtgagacggggagtcaggagatggactgttttctagacaggggagaagcagagttattatattattaattcatttgataaatatttgggctgggcacagtggctcacacctgtaatctcagcactttgggaagctaaggcaggccaatcacttgaggtcaggagtttgagaccggcctcggcaacatggtgaaaccctgtctctactaaaaatacaaaaattagccgggcatgatggcacatgcttataatcccagctacttggaaggctgagacaggagaatcacttgaacccgggaggctgagactgccgtgagctgagatgctaccactgcactccagcctgggtgacagagcgagacttcatctcaaacaaataagaaattgagtgaatgaatgaatgaaagagtaagcaagacagaaatggtccccattctcgtggaccttacatttttggtgctagggagattgcggaatggagccttcagccaattaacaagtaaataaacaagaccatctcagatcatgacaagtgatgggaaggaaataaaatggggtaactcaacaggggtagggaggaggggcatgttagatggtgtatcagcttggctgctttcctagaaccccaataccagtggcttacttaagagggaggtttccctctcgccagccccttgctggacaggtcagggctggctccccacccctgattcagttctagcctggaggaagggaacaagggtgtggaaagcagggcccaagaattgaatgcatcacttccatgagtcaccagctaccccagctcaagggaggctggggatttagtctctcgctgggcagccatgtactcagaactttgtgggagggggtgcctcctttgggtaaggtggttgagcagtgacctcctgacggtttcctgacccttggtcttgacttgccctgtagcagccaactccaaacagccgattcacatggtctacgtcccctcccacctctaccacatgctctttgagctcttcaaggtgaggaggctgggagccggtgctttgcggggagcgtgagtagggctggcttctcccatgcatctcttacctctgcccctccgcagaatgccatgagggcgactgtggaaagccatgagtccagcctcattctcccacccatcaaggtcatggtggccttgggtgaggaagatctgtccatcaaggtatgtgaccctttgaccttggggaccagggagcagtagtgggggcttccctcctgccaggagacgggctttccttttctcctacatggtgggcagatcctgggggtggggaagaccatgagaaggtcaggggtattgggcggggtggggaaaatgagctgtaaagaatccctgacacatcccatctctcccagatgagtgaccgaggtgggggtgttcccttgaggaagattgagcgactcttcagctacatgtactccacagcacccaccccccagcctggcaccgggggaacgccgctggtgagatggcttcaccccagcccctcccacctcctgagggaggcttctctcctcactcacttccttatctccctgctcactcagcttctgtgtggccgtctgtgacagtcacctgtcttgaatctgggcccccgcacctcccacatctccccagtctgcacagatctcacctgtcggatgtctctctgtcacctttcctccatcttccctctcttctgtagctcccaaacccccaatttctacctttctcctggtgttgtccaacttgtcagcacctccctgttagaaaacttgagactcaaaggagccgtggggcctgctctgacttcctggcccctgagcggaactcctctctctgcccaagcctccctcccgcattcatgattgccccattcaccccacacacacttcttacctcagtgtcccctcccacatgtcccctcccagctctgggacccctgccatgtgaccccagctccacacccttccctccctgcatcagtccctgcagctccaggaggcccctgccagcctcctcatcctcactgccttcctgccccgctgcaggctggctttggttatgggctccccatttcccgcctctacgccaagtacttccagggagacctgcagctcttctccatggaaggctttgggaccgatgctgtcatctatctcaaggtgagggcccttcccgcagagcccagctggagaagagctttgctgataggacctgggcagccttggccagctgcgagctttcctttccatccccccagtccttccctggccccagactctgagaatccaagcaaagctacagttcctcaacctgaagaaccctcaacccccagacacgcactgcttgtcagggaatttaggggagtctgtggtctatgattaagacccctgtgctgggaacccttgacttgttagacccagaaggaaggggacaccctaggtcttgccattcagttcagaggagaagactgaggcccggagtccgtgacttgctcagggtcacacagcccagcctcctccccctccctctccctcccttagagggagctgcttgcttgaatgggcaggagcgggacacaggagggaccacccttttgtggtctttccaggcccccgtgtctggcagctgggctgccgctgagctggggtggggtggtctgctgaggagtggacaaggcacagggaggtgggaggggctgaccctgacactccccaggccctgtccacggactcggtggagcgcctgcctgtctacaacaagtcagcctggcgccactaccagaccatccaggaggccggcgactggtgtgtgcccagcacggagcccaagaacacgtccacgtaccgcgtcagctaagggccgccgtgcatctgcacctgagaggacggactgccgcctctgggtccccccaccgtggtgcccctcaccatcctcctgggggagcagggggtgggttctccctgatgaccaggttctgtctctatggaagtcactgcggtgataggtctgtgatggtccctaagtgccagtccatctctgtggagacccctcggtggcctccctatctctgtgggcgatgcctgagggttagggatgtctccaccctgatggggtgtcccagagacattttcccatggcagtcctcctctctgagaccagggctgtcacttttctgccaggggtactgggtccccctcagcaccctccacagcacaggccttccaagtggatgtcccgttgccttattcccccagcccacaaaggcaccctggccttggcctgctgaagtgttaggaagagggtgggtgccctccagacctggggactgagtggggaaaggagttacacccgtgagtggggaatgaggctggtcctgcagcctctccctccgctcagggcttgaaggtcggtggcggagggggtggctctcacagggcccaactctaaagtggaagaaccttgttagaccgagagcttgccatccagccaagctgctcgaggccctgcagtggccttggcaatgtctgtgccacctcctgagccctcccagcatgtcctcacatgctcatgcccacccgctcctccacaagcctagtccatcctgcctgagctccagcccccagcccccactgtgcccagacatgtgtgctcagggtggctttctccctaggaccttctgtgtatatagttagttttataaccctgaatgcccccacccttcccctaagcacacaggggttaaagctgtgtgtccctcccagtggctgtggcagtgacagtgacacccacacccacagtaaagaggagactgaatgagactggcctggctgcatccctgggggaggggacccacacgtgcgcacgtacacacgcacactgcggtgccctgtgaccaccacatgacgcaccggggacgtccggcccagctcaggactgtgagtaaaacactgggcaaagccatctgttcagaacgccggatggcccagcacctggtgacagacctgttgtcccaccatactcagggcccagcagagtccggccaacccaacaactggagcagacagaaattctggtcactggcacatcataaggatttattgaaataaattgagaactgcctccccttcacatgcaggtgggcacccactatagctactgatggctttaaggatgtgggtgccttccaacctcccatggccctgccaccaggcccagatggtgccagtgtcctcatatctgtttccctccgaagcccctctcccagcacagatagcagaggggggataagggctgagtcccaggtacagggtgctggccgtaagccacagcccctgggcaggaatgagggagccagcatgcattggtgccatctgccgctctgtctgggcagatgggaggagctggaggggtttccaagcgggagcccccaggcctcatcggtaactctgaccagtgtcctggaagcgggactagctgctgaccagcgccacacatgaacacttcctccaaggacatttcctaaaaaggacacatgctgtccccaggctgctggtaaactccacccccatccagggagctggccccagccctcagtgtggcccagggaagcagagcttgcaccgcctgccagttctgagcccactgattccctgacaatgcctggggcagatgggggagggctgatgaacctttccaatctcgtagctgccggggacccccaggttttgcctctctgcctggctggggtgagggctgaccaggtcagcagctcctaggccttggctggtggaagtggtgtcctctgtccctatcagttcctgtttgctcagctcccaaagaggacttaggtgccctctgaggaagcagcaggaagtgaagggagtcctggcttggagaatgggtcaaagaccaggtcttgaatgggccctgagaggcagacctgtgtggtgtcatctcgccccctgggacccacaggacagaggaggggagagggagaaggggatgttcatcctcccctcttgagtcctggcaaagactgcactcgccccaggctgctttctctgcgctcctgttgaggagtttggctgggagtctaccctgagtgcgacttgctgcagcgcccactggcctcttgggggagcaggacagagctctcccaccacacagccccctggaagagtggagaggagccgctcccacatgggctcctgctgaaatgcccagcccagctctgagccctggggcccggcctcagggcctctggcaggcaagcaggcaggcaggcctcctagctcccctccaccccagccccacgatggcctgagggcaatgggacagcctgacccagcctcccagacttgcctcagccctggcctctctgccctctccccttcatctgctcctcccccaggaactctgtgccaaacaagtcctcaaaataggatttattactaggccctctccctggggtctccctttctggggtctctgggtctagaccaagtgacagggtaagagagagcatgtcccccctgagagcgtgggaccaggctagcccaagtgcagcgcccaggtccagcctccctggtgaggcctgtgcccgcggagccagtggctgcccctgccgggtgccagcgcctgtgcaccctcccctagctcttcttggcctcctgctctcggcgccggagcttctcccgctgccgcgcagccttctcctgggccttgcgctccttctcggcagctgctgccatctccttcaacttgcgcttcaccagtgcccggtcatgagagttgctgagccccaggctctggggaggagtccggggtgagggagagagtcccagaaccttcccagtcctggcctcccacgcccaggctccttttgccccaggtgtactctgtggagctccaaatcctccctggagtggagcctccgcctcccacaccgtgacctgcccatggatcagaacccccagagcaagaatttggaatgagtgtggttgggaaagatgagggttgggggtattaggcgcttcctcctcctcccccaccattcctccactcagtatttcagccttggcccggacctgcccaacctcctgaggcccagagatggggagtcacttgcccaaggtcacacagttagtgcccaaggaccctcctcacttccagagacttcctgggggctcttttcaccatccctgccccaagcaactcagcagagagcaggagacaggccaggaacctcccagcttataggtcagaggccaccacccccttcctacagcctccccctgcccactattaccactagcctctgagacagaatcagaccaagctgaccagggggagatgtggcttcccatgataccaggacactcatatgcatcaagggtcatcctagagggcaaggtcagcctggagaccagggctggagcttgaaggtcacactgaagtcatggactagagtttcaagtcaaactagggattcatgctacaactcaaaagattagaccaaggaccttgcctagaggtcagaggtcagggtggtggccacagatggagtgaaaaggtcagcccaggaggctgggctgagggtcaaaggtcaggatgagggacttcaaatccttgaaagtcacctcaagtaactgggctgggtcatggcccttccactctgacccacctttagtttgcttccgtccagctgcagcagctgcggcccgtctacctgccgtgcagcaaactcagcagcatactgttccaggttgaggctctgcagccactggcccacctgctggctggtccagtggtggacaggggggaggggttcatccaggaactgggcagagaccaaggagagtgagggggaggcttggcctgtgacctgagcaccttgcagagtcagaggtcaggactccgtgggcaccctgggccagccttgctcacctcatctgaagactgagacagcgtgtggtaggggtaagaacatttggcctcctgccagggcccactggggatcttggggctgctgctggggggcgtggagtcatcactcagagtggattcctagacagaaaaaggtgcatgccactgaggagagttcacccccaacccaccatccctatctgggtggagccgaagtcctggactaggcaccaggagttgctcagtgcctcctgtgcatgagccaggagctgggcctgcacacaggacatgataactcatgtcaggcatcaggacctgaagcctttgggagagcaggcagccatctggaggacatggggctagaaccaagccaggttagtaggaatggaggcggtctcaggcaaggtgtcacttcctacaggcagaccaccgagattcccccaggctgggtcaggtgtctctgctatgcgcctcccgcctggccttagtaccccagctaataagtgcctgattagaggtctttatcctcactggactgtgagctctaggagggcctgggttgtatcttgttcatcatggtgtcccagtgaccagcataagggaaggaagaaagagaaggaggaaagaaggaagttccaggtccgaagggattctttcttcccagaattcccagcttctgattttctcctctgcccagctgcacgtaagaaacagaaccgtagaacaagtactgggctgggggttgtagagcttggcacctatatctgtgccagtctgtgggcaagccccttctctctgggccttcctttgctcatctgtacaatggagatgagcatgccttccctccctacttcaccgagcctttgtgagagtaaagcagaaacgcatttggggctttgtaaactgtagagggcgctctgaacataagcagttgctcatcattgcttctcttactcgtctcacatcacatagggttgtaagctttcagaccactaggttggggtcctgtttgtctctatatcccccaggcctcaccctaccaagcaggtggcccagctcctcacacaggagtggggttagaacttaaccaggcagaagagttagcaggaatgaaggaagtctccagctgggtgaacagtagggaatcagtgtttagtgatttgttgaatgcatgaagcattgactgaatcaaggaatgaactactcagaatatgaaggagtggaagagtgaacgaatgaattcagagaatgcatgaagtaacggatcactgcatggctccatggatggacaaattgattccaggaatgtctgaatcccagcctgagccaaggtgaagtacgccctcatgtcacctgagactgggggccagtttggggacaagaaaggcatggacttacctgggaagctgacttcttagggctgaagccctcgtgtttaggggagcaggtgggggaggtggtgctacccgaggatgctgagcccttgccgctgtccgtgaaccaggaaaaaggcaggaacggggagccccctgacctgccggacccctccactgactccctgcagagagagtgtccagcatgggtgtgggtacagaggggaggaccagagcacatggggagccaggggcgggagctgtgggtgggccgccatgggcacctctcacctgctgcccatggacagtcggttgctgcctttctccttccggctcttgcccgtggatgctcggcgcagggtgaccctgtggggaggcagcaggaagtggggcagggctgcccactgtgctaccccttaccccagcagctccaagccctgcgatctagccccgcctccactcaccccaggtccaggaactttcggcgagtcttcttatcgaggccgatggtggggctggcgggctcaggaggactggcgtcacggctgtcatctttccagggagagaaggaaggaaactgcctgtttgctgccctgcctgcctccttcggctgccagtgtggggtggtagaaattctcttgacttagaatcaggcatcctggctctggtggccttcactagctgggtgtcctaggataagccactttacctctctggccttcctccattttaaatatggggataataacatctacctgcttcatgggacctaatgggatgcttatgacagccttttacaaactataaaacgttccaaaaaggtaggaatcactaccatttactcaattttatcctggccaacttttttttttttttttttttttgagacagagttttgctcttgttgcccaggctggagtgcaatggcgtgatcttggctcactgcaacttccacctcccgggttcaagcaattctcctgcctcagcctcctgagtagctgggattacaggcgcccgccaccacacccggctaattttttgtgtttttagttcagacagggtttcatcatgttgtccaggctggtctcgaactcctgacctcaggtgatccacccgcctcggcctcccaaagtgctgggattacaagcgtgagccactgcactcggcctatcctggccaacatctaaccaaccttccaaacttggctcaaatgtcatttccaggatgttcctagccaggccaagcatcctggtgtatgctctcccgccatgctgccgcacacatttcccaaatagcacttgttatagtttataactagacatttagttaagggatgatttgattgggtttttgttttgttttgtttttgaggcaaggagtgatcatagctcactgcagctcaaaactcccgggttcaagctatcctcccgcctcagccttccaagtagctggttctacaggtgcataccacgcggggctaattttttaattttttctggagacggtctcgctatgttgcccaggctggtctcgaactcctgggctcaagcgatcctccatctcggcctcccaaggtgttgggattacaggcgtgagccgccagccaggcctgatttgattgtttctccactaaaccactatgatgataaagactgcatgtgtttgctcacctgggtgtcccagagcccacaggatctggcacttagtaggcgctcggtaaagaatgagtgagcggcggcgtttactcttcacctcccccagccaccctgctcagctgccccttccgcggctgcggtgcgcgccgggaccgggagggctgctgcgcccgggagcgaccagcaggaggtgcggcgctggccgcctctcaccttcgctgtgcggctctgcgcgcgggtggcggcgcacgaagctgggggagctgtcggaggagggcgcggagcgcggcggagagcaggaggcggcggccaggccctcgtgcgacgcagcgttgtgcaggggccggtagcgtgtgagcggcgagggcggcggctcgtcctcgtccaggctgcgccgcaaccccggaggatccaggcagaaagagcccccggccggggaccccgggcctgagtgcaaaggcgagcgcagccggtgcagggggctcccgcagccatcggtcacctggacgagggggcagccgctcaccgagaaccctcctcctcccttcccggaggagctgggagactttcaccctgtaaactgcgggccctgagggtccttccggggcctagagggagggtttcctcatgccttaggcagcggggtggctggagagtgagaggtgggaaacaggaactttgagtcacacaggctggggctgaattccccctccttcacttactgtgactttgctcctggacctctcagggcctcagtttcctcagctgtaaaatggggctaataatatcttctttacacaggattaaatgagccagaagtgaactgcagctaacacttggcagcattactaggtcaggagtctggggatgtggtttccctggaagagcactctggagagattatccaggggtgggaggagagggaggggtgggagggtgtatatgtgttttcctaacttgccccaaccttgcctccgggcccatccgagccttcaccatcctccgcggagctggcactgtcccgaagcctggagcgggatggccggtgtctccggcccttggccaacagttgggcccgggccttgtgtaaactgctgtccagtctggccgtctctggcacagccaagtccaggtctgcgaaccgggggaggggagcagagaccagacacatgagaggtgacggcaagcccagaggcccacctcaggggccacctgcacccacaccccaggcattcaacccgtgttcttgagtgctgggagcacagacagatgaaaaacagggtgtctccccgtctcaggtgggagtgggcgggtgtgcaggggaagcagaaatgccggcgctaaaatacagcgccgtgtgatgaaccctcctgtagacacggaggaacggcagccctgtttggatgcatcagaggaggaaacaccaaagctgggttttaacgtctgggtaggagtctgtaagagatgaggtgggcaaaacaggtatatgcaatgctaggaagtagggaaacaagggtggtacctccagggacagttggagggtagctttgtggagagaagggttgagggatgaggctggagagatgatggaaataatggccaccatttaagaaacacttactacacaccagacagtgtacatacatcatctctcactcaaaacaacccggtggggttaggacagttactatgcatactttacagctgagcaaactaaaactcagagaggttaagtcacttgactaaagccaccagctagcaatggtccaggatttgagcctggctaggctggctctagagactggccctactggggacactggcttgctgtgccacgcgcagggtctcactcagagatagcactgctgagcatctagagggcttgcagttggagtggagcaaagggacacccccagaatccactggcagtggcaggaaggaaagccccatagtccccgaaacctctcttctgtcctgggtctgtggccctgtgctagatcttgcatgaggacatggaggaagagtgggcagacccagtgggtccagcgttaaagtccttattgctcatagctccacttgtcacgtgctgcacctcggaatgaagccctcatgctgtaccagtgctgagcttggcactggggtctccaaacagaaagagtcttcccaggcttcaagatgggtcaagacttttcctccccactccacccagcatgatctcaggggccctattctgtcactcatgcccaccctgccttgtctgctcctgtttcgttctgtagacaacccctaagccaccccagttgctctcctggcttaactaccacctatttctatttccagccttgacaccctcccctgaattctgagtgtgggcactcaggcacctgccaaggaagttaccacgtcaaagaccccaaggtgtctcaagctcaactcatcaaaatgaaccgatcatgtaacctcaaaccagcttctactctcttccttgactcagtgaaaagcccccttgtccacccaagtcgcccgagtcagacagccctaagctacccttcttctctctcagccccagacccagttggtaattcatgtccaactgtctagttgacacctccactttgatgtccaccaggggtcttcagcctacaggtgctgcaatctcctgatctctcccaccccagagctgctcctcccagtcttggtgaacagtagctccattcttctagttgctcagctgaacccctggagtcattcttcactgctttccctaccatcctacaaacggattcatccacaattcctgttagctctactttcaaaaaatagctagacatactgaaatatttacggtgaagggatatgatgttttggactaggttccacataatccagggcaatagggggagggcgtggatgggatagatatgaaactagactggctatgactaggtcattgttgaggctgggtaatgagttcttgagtgcatgatagactacactttgctgtaatctctaattttgaatctgtttgagattttccttaataaattattgtttgtgtatgcgaatgtatacacatactcctatacatgcgtacatatggagagaaagggaggagagcagaggaagggagaggagaggagaggaaagaaaaagaggggagaggatgggaggaaagggagggaagtgagagggagaattcacagtctcttagaccagaaggtctaaactgccatcatcttttagcctggattattacaaacagcctcctagctggtcttccttccgtctccctttcccatctagtctattttcaacacagcagccagagtgatcctgatcaaacgtgtcagtttatatcactcccctgttcagaaccctccagtgacttccatcttatgcagattaagagtcaaagttctcccagtggccttccagagtcagcctatgctcccttgcctgtctgagcactactcctgtccctccactccaaccatcctggccgcctggctcatcctcacacaagccagcctgcattgcagggcctttgcacctcctctgccctttttctgcaaggctctttccacagatttctgcgtggttctctccctcacttccttcaagtcttcgcttaaatgctttctctcactgaggccttccctgaccacccaatttataatagcccccccactccaaaactccactcctgtttttttcctatatcatttctcattctctggcatgctatatattttgcttatatcatttatggtctttctccacccattagaatgtcagctccatgaggacaggtttctgctttgttcactgctctaccacaggcagagaacagtgcctggcacacagtaggtgcttagcacacccttttaatgaaagaaaaatgttctgttgattggcctcctcacacccatggaacctgggctctcctctcctctggaccgaactgccttagctcaggccttcacctgagtggaggggagctgcccccacctcccaccccctgccaccccaaaacatgcaactatccctccttcgctccctgcctcctgtctggctcctcctcgtaccttccatgtgactagaagaaactttctgaagcacctttcttttttttttttcttgtggagacagaatcttgctctgccacccaggctagagtgcagtggcatgatcttagctcactgcaacctccacctcccaggctcaatcgattctcctggctcagcctcccaagtagctgggactacaggtgtgtgccaccacacctggctaacttttgtatttttagtagagatggggtttcgccatgttggtcaggctggtcttgaactcctggcctcaagtgatctgcccgccttggcctcccagagtgctgggattactggtgtgggccatcgcgcccggcctgaagcacatttctgaccatgtcccatactctcctgcttttgaaactctcgcagaaggggtcccaaagctaacaatataaagtccatgctattcagctctctattcaaggcctgaggggcccagcccaccctttctgtgttcccaacagattcctcctcttacatgactatggctaagagcactggccctggcccagatggccaggctgaagccagttctatcatttgccggctgggtgactctgggcaagttacttccttttaggtgtcagctttctcatgtgtaaaatgggattatactagcactatcttccttatagggtggttgtgagcatcaaataaaataatccatatacagtactttgccataatgctatgacttagtacgagctcaacaggcgctcgctggtgatggcgtctgtgggatcaactgaattgcttatactgatacctatatgtgtacctgcctctacctcacttcccacctccatccctatgctccatctctctccagcccttctttgtccggctgatcaattctgacacagcaccgtctgacagccgcaccacactaccatatggtcacgatacggtcgggatatggtcgccaatgactgtctcctcatgctggcctgcaacctgcagagggtgaaacccttccctgtccactgtgtatcatgagagcctggtgtggcacctgacaaggagcaggtgttcaggaagtgttgaagcaaagtcacacttccatggactagtgcatgctttggcggagatggactccagacacacacgggtgctgatgaaggtcacctccatgcccatgcccacatcccatcacgtccacatttcaatcctctgcccagcactccccaccgtctagtatgttccttgtttatttgtgtgtgctttgatcatctgtccccctacttgcccctgcacgaaaatttgagctccatgaggacagtgattttgtctggcttgttctttgctgtctccccagagccaaggacagagcctgatgcatattaggagctctataaatatttgtcgaatggatgaaaagacggggagactgggaggctacttctttaaatatggcagccaggctgaggtctgggtaaccataaagagccgaggttgcagaaggaacaaaaagagcattctaaggagagagaatggtgcagccttgggcttggagcatctggggagcagcgagggggccagcacagcctgcgaggggaaggaagggtctggttgaaatgggagggtggacaccgagaggagattgcagttgtccagggggcaacctgctggtgtttccagcccctggggctgagctgggggagggagccctctgttcccagccccctgacacagaatctccaggcactgcctggaagcagcagcaaggattgaaggctgaaccacagaaaaataagagctaatccttattgagctcttactgtgctaggcactgttctaagtgctttacaattactatctcatttgagcctccccacagccctacaaagaagggactccaggaatccccagggcagccttaatttgcccgagggcataaagctggtgaggagccggtcagggttacagacagacggtctagctctgttggtaagcattaagcatgctacaccctctctgaagcagagatgggaaggaattttgagtccaacctctcattgtatggatgggaaaactgaggctcaaggaggacaggaggacacctttggccaaggggacagagggagttaaggagagtggctcccaggccagggatctggcatcctctacccttctggcacctagctggtgcccagccaactcaaaacagggagaggggtcccttgctcctgactctgggccatatcagcaccatggccatcttaccttggaggggctggggagcaaggggactcctaaggggcttggtggttttgaggcaaggtgggccagcctgtcctgggtcctctgctctatgaggctctccctccagcttctatctcttccctcttctctgttcctgccctccttccctatcctcctccccctcttcctgctcctcccagccctgggcagtgggaattcataaatatttaatggcctttcacatcaggaagcagtgaggacgcagctacctcagcagtgaggaaaacaggcaggggttggtgtggggagtagagggtagggaggttggggagtaggggcagaaaagcccagggaagggagagctcgtttccgtcaggcctgggcttaagtcaggcctgagtagggacagacactgagattgaggccctgaggcagttcaaggctaggggagctggaggagactgggatgggaagcagcagttcctggcatgaccaggggagagagggaagaagggagagatgaggagaagctggggaccctctggcataggagcccctcgaggagcaggccgctctcaccctctccctcattcctccaagttcctttgctcaggactcctcctgactcctccaccggaatcccgctgggaaaccggctttccgccccagtgcatgctgggaactctgcccagctggggtggtttctttctccagtccacacaagagaagattgcagggggtaaatgatggtaccgtggtgtgtgcatgcaccccagtgtgtactgaggacgtgggcgtgcaggccagcatgagggggccagcctgggggtattgaggctgtgtatgttatgcatttgatttcagcacacatccaagcagggtgaggtcccttgcacttatttatgtgacttggaggtaacgtgtgtcatctgggctggagtttacagatgtataggatagtcactaagagcaggaagtctggcagtttggggttctagtcccagccctgccactaacttgcaatgtgatcttgaaagcaagtcacttcagccctctgtaccctacactcctggtctgtaaactgggcttacattattgtaagggttaactaatacagtgcatgtgagatgggggtgcttaacctagtatctggcataagagaagcacttaataaatggagacccttattgttataactggtgtgtccactaagatagtggtgacaaagggtcaggccacaatacctgcacgcgtgcacgcgcgcgcgcacacacacacacacacacacacacacacacacacactctgaagctgccaagaagcaccctatccccttcaatgcctggtggcccaggaaggaagtactctatggctgtgtctattggctagagatagagccacacagaacttaccaaaaacttcatccacgggttctcggagctttgaagaagccatgactcaagagagctgggaaggacaagaggggagagaaagaaaaagagagcctgggttagagattcaggctgaccgaggcagaagagatgtggaaggctacctgctccaggcctgttggcccctccccttaccttagaacccttcttctgtcccctggaagagaagccactggaatcataacccagatggtgggcgccggggcaggcagtatagtaggagggtgggggcagacgcaaaaccaaggcacagacacaggctgagccctgtggtcctggtatcctggtccactgatttgctgtgtgccttcacgtgggtcactgaacttctccccttcactgtcttgggccttcgcatcattagcatcccctaaaagctttcaatcatcaactgtccaatcaaatctgggagaagtcatggagattattaaatccaatcctctcatgttacaaatgaagaaacagaagggggagtgattggcccaagatcacatagcaagttaatggcaaaatcaggaccaggacccaggttctaccatccgtctacccacctatgcactcatccacctatctacttgcctactcatcatccattcactcacccatctatccacccatccgtccatcccacatctgctcccatgcacccaacacctgccgccatctgtccatccacctatctttgcatccatcaattctccatctcttttccaatcctgcctcccccttccctacacccccatcactggtgccctcaccacctgcctttctgaacaagagctgttcaggaagctggcaccatcagcagggccactgttccagacacagttctcacagttcttgacagactcatagatgtaggagggtacgaggaatacacacagcacacaatggacagccaaacctctatgatgcaactatgttctgggaagaagtgtgaatgggtagggttttttttgttttggttcaaggttttttggtgggaagcaagaagggagggcagatagggaaggatatatatagctgaaaccatttgaataggctttcaagcagatgtaggattccagtagccctagggagcccactggccaggggatactggctggggggagagtgaggaagcccaggggccattgatggtttaaggcaaggggacgctgcatggctgagacatgacctccaattacttctaacactcaggtccccaggagaatggcaaggcactgagctagatcatacatgtgtcagatgtaggaaggctaggccacatgcctgctggggtcttttccaactcttcttttctgttattacatagacatcatctacctttactgtggccagccttgggaatttttttttttttttttgagacggagtctcactctgtcacccaggctggagtgcagtggcgctatcttggctcactgcaagctctgcctcccgggtccacgccattctcctgcctcagcctcccgagtagctgggactacagtcgcccaccaccacgcctggctaatttttttgtatttttagtagagacagggtttcaccatgttagccaggatggtcttgatctcctgacctcgtgatccacccgcctcggcctcccaaagtgttgggattacaggcgtgagccaccgcgcctggcctgggaattttcatatccccactttacagatacatatcgccactttacagatgtgaaaactgagaaacaggagatgagaggaagccaggcaaagttggtgcatgcttataatcctagctactcaggagactgaggtgggaggatcacttgagcccaggaattctagaccagcctgggcaacatagtgagaccctcatctcaaaaataagtaagtagctgggcgtgatagctcacgcctgtaatcccagcactttgggaggccgaggcgggcagatcacctgaggtcaggagtttgagaccaacctggccaacatggtgaaaccccgtctctactaaaaacacaaaaattagttgggtgtggtggtgcacacctgtaatcccagctactcaggaggctgaggcaggagaatcacttgaacctgagaggtggaggttgcagtgagccgacatcatgccattgcactccagcctgggtgacaagagggagactccatctcaaaaaaaaaaaaattaagtaaataagtaaataaataaataaaagcaataataataataataataaaagaggcagaactcagccttgagccagggctcctgcccctctgcgctatcctaggtgatgatcttcagtttaggggtggaggaagagataagcatagagggagggaagctgctccacactgaccaggactgggagaagcatcaaaaccacctctaggctgggcgcagtgcctcacgcctgtaatcccagcactttgggaggccgaggcgggcagatcacctgaggtcgggagtttgagaccagcctgaccaacatggaaaaaactgtctctactaaaaatacaaaattagccgggtgtggtggcacattcctgtaatcccagctactcgggagacagaggcaggagaatcgcttgaagctgggagccggaggttgcagtgagccgagatcgtgccattgcactccagcctgggcaacaagcgcaaaactctgtctcaaaaaaaaaaacaaaaaacaaaaccacctccagattccataaatgcctggggctgaaagcagaaaatgaggtgtgggaaggggtcatcagggaagcagactctccgagaaccctcctgccattcttgaactccaggggctactagcaaagatctagaacatttcttcctgtcctgacaggccagatgggaaggaaggctgaccctaagaattaaccacatttcctgattcaaccacaaagccttatctggctaggacccagctgccacctccttcaggaagctgtcctaggtagccctccctcctctcatttgtcttcgtaatttctaaatccacccttctccaactactgggaaatggggaattcttcatacttcactgattccttaaataggtctcatctcccccccaccaatcagatgggagcccagagaagaaagggtccacgtattcttccgtcagactagggactgtgaagacaggaactgcctctcccatcagaatggaggctctctgagggcagtagtgttgtctcctttctgcctctgagaatgaagatcctgtgttctttattcaagagcccattccagggtcgagatcctctgctggctggagtcctcctcttccaggcaccctctgggctggattggggtttcctgctcaaagccattctcggtccatcctgattcagcacaaactgctctcttttcttcccttcaacaactaactttctggggtgtgtagggggaccctccctacattgtgtccagggggtcaccagacccctcccacccaaccctctccttccaaaactgagcctagaaaaattagacaccaaacccgcccccactctcactcccacacacaccccgcacactctctcacacacacacacacacacacacacacacacccccattcagccaggtaactgcacaagggtgggattgaaccggttcctctggatacccttccccccaaggcttccaatcctggagaaggagcaccaatgacctttgacccttctctgggagaaagggaggcaggtgagctcacagcctcttgggacccaggagaaggagaaaggaagaaagggcgcacaattcctggggagggagcgggagcgggagcggaaggaagtgaggagtaggaagaagcagagacagacacacaaactggcggagagtccacagggctgctgagaagaaagagatcacaccgagagtggggccacgggaactggcactgggaacaagggcttccgccgctctaagtgacgcccgagggtgggagagaagggagaagcccttcgggcaggcgataggaaagggcccctgaagaggagaaagcgacagagagaagtgcaactgggagaggccgggaagaggtggatgggaaaggagactagcggtcggggaggcagttgtggagccagagaggtggtccccccttcccatatcgccggccgtccactggccccaggcttggggtagtcctcaggagtcgggcaccccctcaaagcactgttggagatggggtgaggttggggacagggcacctactccactctcagagcccttctccccagtcagagcccggtggctagtttctctccaaaccatcagcacaactccccgccgggcaagaaagagttaagccctctccccctccccccacaccagctttttattaatttctccgggcgtcgggcgggagggaggggattagggccataaatcctatctccgccccctcccctgacagcccggcaccccagccccgtgcggtccccctagggataggggaagaaaggcccttgtcgcttagccctgcccaaccccactcagggtcccaccgcgggcccgagtggccctagccccagttcccggtccaccccagggcgcccggcccctcacctccggcatcggtcatcttcagcgtctggcgccccgggaacccctcaggcccatggtgctcgaggcgggggccgggcaggagaggggtggggggaccgtcaccccggccgcggggggctccgggcgggctcgagccgctccatcccgggggtgggggtgaggtcggcgggaagggtcccagagccgggggagatggagggcgggggatgtggggagagggaacaggttcgctggaagcaggaggcgcgggcggggctggaccaggagacctgacgggaggatgctccgtgtgtgtgtgcgtgtgcgtgtgcgtgtgtgtgtgtgtgacagagagagagagagagagaagagcgaagagcgagcgccacctccctccccgcccctgccgcccgccaggcctggccggacgcggggcccccgcctggcagggccgattcgcgcggcgtcgcgtcggcaggggtccgcgggggtctccggggaaggggcgtcggggtggggggcgcgtggcggagaagccgggcgcccaggagacaaagagcgggagggagcgagggggcgggggcgggggagggcggcggggaggaggcggctggggccggggagcggagttgcagctacttctctgcccgcgggagacgcggcgcaccggagtctgcgcgggtgggagcggctccggggcggtcccgccacgggacccacggggcttccgcctcctctgccgggtccatcagggctcccgattagttcattcattcaacaaacgtccgccgagcagccggggcgccgaggctggaggggacagcggtgaacagaacccccgccccctaactgcgctcaaggccagtgggccagtcgggggctcagacgagtggggaggccctcacgagcctgggcgccatgggcccagctaacagagggcacttcttgccggaagggagagcgcacccctggcccggcctgggtccaggcggccgcggcgggagctgggctgggggattcccagaggatgtgatgtgttggctacaactgcgggccagggtagggaagtgccagggggtgttgggggtgggagggcaagaggggaagataaattgaagctggggaggtgcagggggcttgcactttattctaccagccgcccaccccgccgcccacacacacacacacacacacacacacacgcgcgcgcgcgcacacacacaaaattaagaggagggaggggctcaggtgtgcatttaggaagcacccttggctcccctggagacagggttacagagggcactctgaaggcagggagacccgctggaggctattgagggccggtggcagtgggcataaagattacagattaagctgagagcccttcaggatgcaggcctgaagaagctgacaccgaagaagctgacaggatttggggacctgctggactaggaggtgagggaggaggggtctaggatggctgtggaccttggcttgaggcaggaagccctggagcaggtgggggtggggacggatgagatcagacttggacccagtgcgctgatggtagtggcaggccagccagggaggcaatgtagggatccacaaccagctaccgcacgtcacagcttggcaggtgccaggcgctctcagatcatctattgtcaccctcacaataaacccacaaggtgggtgtttccattacccactgcctcagagaaaacagagacttagaagaaggaaagtgctttgctcaagagcaagtggtgaaaggccaggcgcagtggctcacgactgtaatcccagcactttgggaggccaaggtgggtggattacatgaggtcaggagttcgagaccagcctggccaacatggtgaaacccttgtctctactaaaaatacaaaaattagtcaggcatggtggcgctactctggaggctgaggcatgagaattgcttgaacctgggaggtggaggttggagtgagctgagattgtgccactgcctttcagcctggccaacagagtgaaactcaaatctcaaaaaaaaaaaaaaaaaaaaaaaaaaaaaaaaaaaaaaaaggcaagtggtgaagctggatcaggggtctagagtcagaggagaggtgtggagtctataggacagagttccctgatggcccacaggactctgcagtccgaggcctccgggaagtggcctgttgaaccaggacaatcttgtgactatgagtgaggacagaattaacagcctttagggtctgagggtatcctaggggatttataggagtttgggggtctctgggtgtcttcagaatcttctggcagccatgaggctagattgtggaaatctggggaaggggtggggtttctgttgacagctgtgggggctgcatctggctgtcttaaaggggttgtgctttgtaggcatctggtgagatctgagtggtgggctgtagtggggggcttgattatatagaccctgtacatcccaagggggtggggagatgatgggtatgtttgccaggccataggacccaggaggagcccctgttcccctattcctagtgaggcctaagcttctgagggttggcaataagttgccttattggcaagtgttggcaaacctactcaagcttccaaaattgggcaagtgagtggggggataaggagggtttaaggtgacaggcccacttacagctacttgacaaagtcccaaacatggacatactgtgtatcatgggcaagtcacagctcaggcttgagaaactcacagcaaagccacacacacctccaggcacacaacacacttgggcttaaatgtgaggggttacttggcccactgtttgaaacatactatgtataggcccctcacctaacacacaggacagacggggagtgggggagggacagagggaccccgccctggatgcttagcccccatcggcccagcagaaaccctcgaaaccttcatgcctgcctccccacccagattaagactacagattacaggaaggtcatgccacttcacttcttggctaggtttcctgagcagggccttggtggccctggggttcagtgacttctaactctggagccatgacctctgaccctgtggtttggtggtctctgatcttggggatcagacaccttgatccgtcttcagcatccttagggctcccagagtgttccaacaatcgtccacatagcaaagatgccttgggaagagtattcactatccccaggtttccaggcaaccctcaggtgggaggcaggattggactggcctgaggtgtagacctagggtttttgagggatagctatgggaagccagaatttggcttagcatgaatgtgacctgtgtgacacagccatctacaagggaagcttctggagcagactgtccctgggggtgctgccactcatctggatgttgttaaggacccaccaaggtgaccttgaagggctctgaagttgggacttcattccttatggcaaaggtgagaattccctagtgccacaccactgagtgcaagtgcctccatgcttcaggtctctgacatctgcacaccagcaccccggcaaggaaaggctggccctggggcctgccataagctcctgccccattccctgctggctctcacccctctgggacttcaccaaagcttgtccctggaactctggcacctagactcccagacccattagcatttgagctggtgagtcagcacacaggcctgctggcccagcacaggggctggggctatttcaggccacttggcccgccccaaagggcaaacagatcctctaggaccctgggtactaaactgccaggcagtcacctcccacccccagcaatcctttgatcctttacctgcctcacaccgggtgcctcttgagagtgtccccacagtttaaaggccttctgggggagggacttggggttcaccttgctgtatttagcccatcctttgaacttcttagaggccctgaaaaacgaatgcagactaaacaaactctctagaaaccctcagccctgcccaggaggactggacaaaaagcatgggtgctgatggctggaatgggggcagaaaagcagtttgctggaaccggaaacggggggacactgtaggaagttcctcagggttagaggcagcactggtgggaggggaccactggggcagcctggcatccttgatccctgcccactccccacctcagtgaatcaagaaaccaggcagcaaggctctgggggctgcttttatggggacgacctgacagagggcatggtccgtacaaaaccgggaacaatacatacatatatatattatatacagagatgcggccctcccgacggctgggcaggggtggccgctggcccaagcagcccgaagcggccccgcccacccggttccgccccctccatctgccggggtgaagtgcgcgagcccaggactgagacagccagctccttcaggggatgggggcacatctggggataggaaggggtggggacaagaaatactgatcgaagtcatggtctatttacaggggacaagaagccaaaacggatgggatgggtggtctgtttttaaaaaatgaacaaaaacccagttagggcaggggcatgaagtggcaaaatgagatggattttgaaaggggaggggacctgggggaggtggtctcacctcccttggtccaagccccaatttggggttaaagtggggaaacagagtcgatttcacttagaaggcaggctgccagcagggcagccctggtctccaaaaagatgagtagtagtaaaattttgccctccagtcaaaacattggaaaaccagtagggggtgggggcgaggctgactccctgcaatgtcagtaggcttccaggcatcgccctgggctgggcagacagggcagcacaggataggacctgactctccagggagaaatgttccccttgcctaagaccagggtcgctgtagccagaccccctttcctccctggcattcccaggcttgaccaggaaacctggaccccagagaggccacataacagttccaagacgaggttatggctatttggcacctggaagaggggaggcacaaggagaaattgagggctgctgccccaggcaatggggagctggggaccaggtgtcctgaactctccctttttcccactctcactcccccttttcccgaaggacacatgagaaatcagtgcagggccagggccaggcccagcctccgggctctggggtggactctatccctcccaggacagggaacagggatgggggaggtgttgaggcaacgcccccaccccccaggcgggagggtcagaatgcaacagagacggcacaatgatggggggagagggaagggccgagaaggtagaatctcaagtcaagaggcccaggggccacccaggtgccccatgggcagggagcagcccccagttggcagatgctgggagagccccagccccgttccagtccagagacaaaagctggagtgtgtaaagtctggcagtttgatctgcaggtgcttgtgtccgtcgaccaccaggccagccctcggcagccctcggcctctgtgcctcagccccatggggcaagaaagaggctgcccttctagccacctctgtctgcccaggccatcttaagggggcctgtgatatgagccctctggtccctgaagctgggggaggtggggtggaggggtggggggagtcggggcacctgtccccaggctggaagggggaggggtggggtgttgaggacaggggagggaggacaatgggaggggggttaattattgtccagtcatggaatgattcctgttaagtagaattggaattcctcagtgtttgcaagtttccttccagttctgagatctggaaaacaaaggagggtagggggtcaggtctggacaccaggcatgatcccagccccttccgccccccggtgaggacatggcatcccctccctccaggacccacagggtaggggcttcaatgctgctccctccactgggccctgcccacagggcgccccaggcccaccttgtccaggagcttgtccatctcctcctttctggccagctccgactcctccagaacccgacgctgtgcagtctcctttttcaggaactcgatctccctgggcacaggcaagggacagatggcaggtaagggtgtgtggtctggctttcatccagggtgacccaggtcctcagctttacctgggcaactctgtccttccctgttctcaggtcaggaggccccaggttttcccaaagcctctgggggtctggctctgtgctggctctgatgcctggtcattccggaccgggtgtccccaccatggggccctccaacttctgtgcctccctactcagctggagggatggggagggactgtccccaaaagcctctcaatgctccctgggcccagcccgcccagcccccagccacgtacttctgctggtagtccttgatgaggcgcttggccttgctgtacttgcgctccagggcctggtactgcgcctgagtctcccgcaggtgctcgtccacagcctggcacaggctctgggcctcaccccagtagccttccagtttctccatgcgctccttgttctcctccacactctgctccaactgcgccttctccacccgccagcgccccttctcctgctccaggctctgcagctgagagagaaaggcacggccctgggttggtgggggccagcaggagccaaagggtacccccatcctagcactggggccagagtcgccaggggattcctaccgttgtggagtccattgcaccccaactactaaccctctttggctgagcctgagaactgaaacccagagaggaaagaagtagagctcagcctcagagctcccaccagactccctgtcactgcaccccactcgcagggaggctggaggcttcggttagtcactgatactctgacttggcgcaatgcaactaatgtcccaagcctcagttatcccatctgtaaaatggcagtgatatgtgcctcccaatctcacaaaagctccagtgagacagtacatgtgaagtaaaagggcagatgagggtcaccattactctctgtcccctctctgcagccccagccctgctcgccagtctctgcacttgtggcttcctgaacaatcctggttctctcccagcttccaggtgaccccagcgcagacctccagtcccccacagctcagttccggatcctctgttctctctatactcactgccctggggcaccggcccatctcccacactacctctgtgcactctgagctgcaaatctcaagtcccagcccacccttgctcccaactcccagctttagctcccagctcctcccaggtaccatgccccagaccaggcccccgcagctgcacaaacctatgcctcctttcctgacttgctctgttaaaaggcgccacaacctcatagccatgttggcactcagtctcaggccagtatttgctgcaaacatcccttgctctctgtcccccagccacacaggccttcctgcagatcctcagacttgccacagggcctttacgtgtgctgtcccctctgcctggaatgtcccccatctaccctcctgcttgcctagttatttccctctagctcacccttcagctctctgctgtgtgtcacttctccaaaaaagcccccacagctccctccaacagcacagccctactcccacctccacccgaatcaggttcctcctgctttagcagctcagtaagcctgttctctcctacagagccccatgccagcgtgtgatgatgacacagtcactggtttgcagatgcacaagaacaacgatcaactatggctttgcccatcatggtgatgagaacaatactggacatctagaaggtacccagaggatgtctgtaagtagaatgcactaacagacctttggcgtgcccctccctttcatactctgcatacacctcaggaacatggcctgtcactctgaccccggaaatgcagcgctcacctacccttcctttccagaccctctgcctatactctgagcagtcctggcctacccctgccaggacactgtctgggcccctaaccagtttgcctgcctcccagcactgcccactttcatgccctcccactttgtaggcagtggctttccgaaaaatcccaatggccacataccccatgctatctgtaggaccaaggccagagtctttagaggggaggcaggatactgcaagccagagcccatcctggcagtccagccctgcctccacctctccccgacaggcatgctgccacctcctgactggcctcccctcaaagccagactccaagctccatggagctcctctccctgccaggaatgcccctgcttctgccccagccatccaaaccctggcctcctctcctgcatacccccatgtgggagggtacacacactcccatgtctgcaagacccctatagatctgtctctccccaccacggcagaagccccataggtactgggactcctatagtctaggtcccagcagaggccccatacagacttttaatatgaagtctgtatatctgcatgcctgtgagggtgctggcacctgacatgcttgtgtaagcatctgtgtatactacgtgtgtgtgtgtgtgtgtgtgtgtgtgtgtgtgtgtgtgtgtgccacgtgtctccatctggggtcggcatcagcacctctgtgttacttgcccagatgagaatatgcatgccctgtgacactcttcctagaccaggtggtctgatcgatggccatgcctgtgtgtttcagagcagatgggtgcagagtgggtctgcatatccaggctgatagcctcgagtgtaatgtgaagcacaggtccattgtctctgtgactgtgtctgtgtagagtgggtgtctctatgtgtctgggtgagggggtctgtgggtactatgtgcctggggccaggctgctgtgtcagtgtgtgtacttctgggtggtctgtacttatcaatgggcctatatatagcagacatatgtgggacagcacaaacatagagacacctagagcagaacttagcatgcttcggtatcacagctaatatactgacttttttttcttttgacacatggtctcattctgttactcaggctggagtggagtgcagtggcacaatcacggctcactgcagcctcgacctaccctggcccaaatgatcgtcccacctcagccacccaagtagctgggatcactggtgtgcgctaccacacctggctaatttttgtattgtttgtagagataggttttcgccatgttgcccaggctggtctctaactcctggctgaagcagtctgccttggcctcccaaagtgctgagattacaggcatgagccactgcgctcagcctactttgactttttattgagctcctattatgtcacacattgtgctaaagacttgacgtgtgttatctcatttaatcccacaacgatcctgtggtgttggtgctattacgacctcattttatagatgaggaggctgaggcacagagaagcaagtgatgctggagcagatggatccagagcttaagctcttaatatcgtatctatcatatcatcttgctttagagcagcttgttctgtgggtacctgtgcctaagtgtcagcatgtgcaggtgtgagggtagggggaccctgctcctcaacacacacatgcacgcacgcaaaagcacacacatacgcacccttacctttcttttcagctgctggatctctgcctcagtgaccgcatgcttgatctggagctgttgggcagaggggcaggcactcagctccagcagggtggggcaggcagtgccaagggcaggagacctgcctgcctttccctccaccactccagggagcccctcctcccacctccttgaacttgtgcaccagcttctcgggctccatgtccacaggggacagtgcatcctcgttctccgctagctcaaacacctcgatggccatctcaccacccgggaacgtggggctcagctcctcatcctcgtcagtggcatactctcccgtctgcgaagggagaccggagactgtgggcccaccccacccagctgccctcagccctgatgaccagggctgggaccagttgcccatgccagacagagagctacccaggaatgtggttcatgcctcccacttcagcctgaggctggaccagagacacggtttatgtcttcccccaacagcctggtagtcccctgatgacagagggggtcagttcctcatcagcctgggtctctgaagaaacagcctgtactatctttccccttctggatctatctccctttcagattaggtcccccaagattaggggctatgctctccccgcagactgggggctctttgagaggactgtgtattccttgtccggcctctgaagacaaagagtgtgactggaggacagggaatggcactgtgggctttttactagggcaggggaagcagtagaggcagatgactgtaatgcttcatctagccaccagggggcgaccacgcggccagccaggcagggactccctacctcctcgtcatcctccccatactgggcgtatctctgctccatcatctcccgctgccatcgctcctgttccaaagtctgctgaattagctgggccacttcgctctgctctcccggccgctcccggccaatcataaacctgcaggggcaccggcatcatccgctgcctctgtcctcagccaggtaatgcatcatcctccctgctgatgctcccctctccaaactcaggccctcccaggggaggagagatgagagggctgagtccgaaggctgcagtgttaataatgaatgggggaatgagggcccttatcaggtttccttcccaagggaggcaggaaggcccattcacccctctggccagtattgcgggagggagaatgtcagcccacctctaggctgtgctgcaggggacatgcactgaggaggctcttcccctgccacaggggagaaaatgaggcagggaaaggtgaagatgaccctcccagcagggatgggctgcggaggtgtttcttgggtatgctccaagcccctgagcttcaggaaggggcgggatgatggcaactggagattaggatggagaggaaatagtggaacttccaggcaccagcccctcctcccggtggccacccacatcctgtttctctccaccaccctttcctgggggtagtacccctcttgcaggggggcagggagtgatccctgaatgttaagccaaaggtagagtggacacagggagcttctgatccagtccccttggttacaggcctggggcggagtcttcccaggatgacatagggctggtcggggtggggggcatgaggtcccaatgaggggaccccaatatggttagcattcaccctggacgtcctggttcttcagtcagtgagtcagggacaggtagggggaaggagaagaagccctagaggacagtttggagggctggtggacagtgggccaggaaggctgagtactggtggccagctgttgccagggagctgggatgagaaggcaggtgtgaggcgagggactccaggcacagcaactcctgcagccaaggagtcagcagaacctctgtgagctgggccaccagaaccttaactggctgttaaggcaggtgaacggagtgcctggacgaggacctcctgcccgctcccacgccccacccctctgggctctcaccgcactcggcccttggtgttccggagcacagacgccgcgaagctctgggtcactcccaccagacttgttccatccacctccaccaggagatcattcacctggatcctagcggagtgacattggttaaggggtcacaggggaaccgaggagcgagggtagaggtagcctcctcccatcagaaactccaggctccccagcctgagtacatagtgagaactcatctctacaaacaataaaaagaaaaattagctgggcatggtggcacgtgcctgtagtcccagttacttgggaggatgaagtgggaggatcacttgagccagggaggtcaaggctgcagtgagctgtgtttgcgccactgcactccagcctgggcaacagagtaagaccctgcctcaaaaaaaaaaaaaaacaaaaaaaaacaagaaaagaaaacaacaacaaaaaacctcacagatactttgtcctcacagggacctggtactttgtctacctgcgtaacattcacaaggccagaggattaagtgtcagccaggcccacctgtgtgggcagtgagagccaggcaagcaaagcagacacaggcgtccaggaccaggagacgcggcaggcacacttcctgtgacaatcacactcttgtcccctccttcatcatacttgactgagcggtgtgacattctcagagttcatctctgccatgcacactggccaggagccccacagcacacaagtgacatgccaccctcttacgtgtacatttctgcacagaactgagtgcacagatgtcctcccaagtccccaagaccgaatggcactctctcgagttcacacactgtcccacacacacctgatacaggtgcacctgccgacacactccagttgtgtcccctgaagcccgtgttctccatacaaggggaggttcagtctggcctgctgagggagatggagggtggggggcctctcagacacctccctcctccactccacctccctgggagctccaggccttctctcaggactcccacacggaaatggaggaaatggcctattgtcaacagctcaccccaacacatgccactcccaggtgggcatgagtgagtggccacggccaccatgcacactcactccttagacaacccacaggcaacaatgggaaaggctctggaagttcacattgggaggggaaggggtaaatgaaagggtatcctgttcccggcccctctccatgccacctgggccacaacaggtagaagccccttgacagggcagccccatctctagaaacaagatcccaaagtcacccagatcccaaaggacacctgctcacctctgtcacatggagggggtctgggtttggaggtaccaccacaagagatccccaatgtcacctctaacttacagccaccctgggggatgccctacagcccttcctactgccactccccacacccctggaatacacagctaacacaggggtccctggctggcacacagctccaggatgccctccctgaaccttctgtcccacagaactcaccccttgcaaccacagatgctcaatacaggcacacacactcacatgcgcaaagacagcctgtctccagagccactgccatcaatgggtctagtcacagcctcctggcccctgctctctatgccccagccacacctgcctgctcatggcgccactgcctggaacctctgcactcactccctcagcacagctaactcctgctccagccttagctctcagctccagcactgcttcctccaggaagccttccctaatgcccagagagattaaaccctcctgttgtatgccttcacagcagtctgcatttccctccatttcactaccttttgtgtgtccatttattcaatgtctacctcacaccacactgcacacttctcaagtgcgccaggccctcaccattgacttcccagggcccagcaccggcccaacactgtcagagactcaatgtccagcgaaaaaaaagctcaaatatactccatgcctgtcttctccctaccagggcccaaactgtactccagaccgggatgcacaacacacgcctatagcccccatggtcaccagcccctcctggagaacacacgctccttcagggcataggggctgacagtgctcactgttgtatttctggggcctggaacagcacctggcatggcagtgctccccgaacatctcagctgcacacacagcacggaaatctcccagggaaggcccgccccaccccctgctcagtggcccaccccaccaaggatggccggtcggagagggaaaaagggtcaggcgagactggggaggattggtacctgccatcccgatgggccgcaccaccctccgtcacggtcttgacgaagatacccagcttctccaggcccatgtctgccccggcgcccatgccgatgatgctgatgcccaggccctcggagtctgtggaacagagagtggtgagatggcagggcttgtaggggacagacgagagactctccaccccgaattccagggcacagcccccccatcaggaagcagtccccattaggggatgtcccacaactgaagaagggatatagttctgtccaccgtctttgccaagtctactaggatggctcctgagccgctccctgccctttgtcccttccaaagaaccaatgggcagaagagcgtgccaagggtggcacaggcaggtaagactgttgcatatgcagaccagggcgtgtggccaggatgggggtagccaggatgggggtagccaggatgggactcagccctaagcctttggtcttctccctctcagccagtctcatctgtactcatagcttcaaggaccaaagacctccagattttctctcccctgaggtccattcccctatccacacctgcccctgcctgactcatggccctctgatgtcccaactaatgaccttcccccacaaacactccctcatgggggatggtaccaccacctgccacctgccagacctgggaggcacctggattcctccctcccactcacagcctccacctgagccaaatgacccccagatgctatggattctacccctggagatctttccagtccacccacacccgctctgccatcttcctgtccacgccacagtggcctttctccatccacttgtgaccccctccctacatcacagcctggtgtggtctttctagacctttcctgtgcttcgaaatggctcccaatccatcttagcaacaagaccacgtggtctgcaaggcctcatttgcatgctcttcttgccctccctatgcaaatgcagccaagcccctttcctgactactcccctaattcctcctcaccagagtgcaactcaagcttcacttccctggagaatgcccccaagcacagtctggttaggtcacctgttaaacgcttttacagtggcccctccttaccttccccagcccctattccagcgcctaagggtgagattagatgtgactgtgccttccatgtctgcctcccccatccatctccccaggagcccaccactgtgtccccaacacagagcccaggacctagcacacagtaccctacagagacctgttaactgaatgtgcaaatgtggttccatgaccggggtggtgggggtgtggcttggcctgggttggaggccctgtttgctctgggtgctgacaagggaggagcggggaaggtcaccaagggcctgagtcagagggagaggcccagcaagtctgtgggagcccctgagggcacagggcaggagctggtgccagagatgagacccgggtcaaccccagctgtgcgcaagtgacgtggcctcctggcctctcacccttctccagctccacagggaacagctccaacctctccacacgcttctccagctcgtactcagcagaggctgccatgggatccacatcctcgttgcgacgatcgtaatcctcgttggagtaagtgctgaacacctggggagggaggcagctggtcagagaggccggcaggaggacaagtgcagaactggcatgaggaggccgaggaggcaggctgagttacccaccccatgcctccccatgatagccctgagatgaggcctcacccagtcccctgagaccccagctctgagcaaaacaaaggcccttatagttctggagcccagggtcaagacagaaagggacccagccttggcagacccgcactgctattctctctgtagctccaaccagcgtgagcatggtctgccataggcacagaaggggaatcctggagaaacgtccaactcaggaacccagacacccagatagagggaaagtgagagataggacccagagagccagacaggcgagaggggacacaaagacagacacagagaggaaggaacaggctgagcagaagaggggaagaggaggaggggagagaggatggagaagatgctggagaatgccagatggggagagaggggggagcgggtgtgagacagaagaggaggaggggagcaggaggggtggaaggggagaggtacccaggactggctctgacttgccgctcaagtggatgttggagcaggggagggaagcaggaaagaccatctctatccccgtggagaagaggcaggccctccatccccaggagcccctcgggtggcagaagcaggggaaaaagctgggcctggccttccctgcacacccaggccgctctccctccacaactgcagctctctaagttacgccccctgtccatgtgctagggggcccaggagactgaggaggggacagcctctgacactgcccacagcgaacccaggcgccatggggctccgaggccacccctgccttggcatctcctgtacccctctgttgtctctctccaatgtctctcagcaaaaagaggaattcctcagctctgactccctcagaaggacagagaaggtggggctgggctctgtgggaatgtctaattctgggcccaggcaggggtgcccccagtgggaggttaatgagcaccatttggggtaccatgacatgctcaagcttcatcgcctgcagtgacaggttggcaccacttggagccaggcgggggcggggagggatggggaacagctctatcagttggctgagtctgagccccgaggagtcagactaggaccccatctcccccaagggcccttgtcagggcccgtctcctccaggagcagaccttgtgggcaccctggtgggcagcagcactctcgtgtcccagcctttgtctgggtttgctccgtgtcgtccccaccccctaccagagaggctcactgccacagtgggagagggagggggtgctcataggactagaaggcttaggtgggagggacccctctggtcacttagctcaatgccctcaatttcacagcatcagagaaactctggctccagcccttaaagctcatctgtccattgcacccctcgaacaaacaggctgcctaccttgcacatagtccagggcaccaggcccactgcccaaggtcacatgggttaaactgtggccaggcagaatgagactgcacccagctgggacaggtgggtgggtcaccggtgacttggtttccactgcacacatgccccaggctctgggacagggctgatgtgagcctggactcagcagtgggatttggcccactttgcactggagtcccctgactctcaccctctgctctaggagacacggtcccttcatcattgagtctctacagtctcctgagtcaacgaaacccctccctgacacacatggacacacacgcccgctgtgacctccaaaacacacctcacagcctgtcctgggctgcaccctgccctcttctctcagcctatcaaatcctgttccctttctggtcctgccgcctgcaggaatcccaggcctgggctcagaggccccagaccacctcctacccctcctcgggctgcccaccatgatatgccggtctagcagagggccctaggggaggtcccacctccctgaggccaagctggaattgggttctctgccctcagcagaggcctccacctccagaagggcaacaattgggtcatccatggggaccgggaccctggacttggcatcaaggcaggggcaggaagaagaaaaagtggggcccctgtgccagggtggggaggaggaaatccccagtgaggctgaaagccagccacactgggcccgccacacacgctggctctcacacagggcgggccagctccaaagtcaccagggagccgggaagcactgctccaaatcatgtgctattttttactgaaaaatcagggtaaggcgtcaaatatagacagtcagaggcccagaccaaactccaactctgagggaatcggacttctcgcaaaattagtgggggtggggtggggggatccaaactctgcttcagagtcccaagaaacactacagtcccccattcccttcagaaccccactgccttcaggaggggaaaggggttgggagaggaccccgcaggtcccagcccaggggagaggctggcctgagagccactcacttttaacctttcaggcctcttgctggggtgggaggtgggagaggggcagaggctgacattctgggcgagtgagaggaaagttgggaagcttcagagtccaggagtagttatggaaacgacaagcaaacagatggtgctttggctagggaagggtaaaggcagggcagggtccaggccaaggagagtccagggacctggacacttccatggggcggacctggggccgggtgcagctgagcctggggcggtgaggaagaaccctgcaggctgaatgtgctagccaagagtggagggtggtgggaagtggggggaggggtggcctggggtttttgattccccccaggggatgttccctccccatcagggctgttctgaggatctcaaagctctggcacaacccacaaaccaaccaccaatagtggccgtggggatgagacccccaaaaggggcagctcccatccctctttcagggctcccagagaatgtggcaagaacacttggggcctgccaaggccatgggagtctgtcctattgagcagccaagagtaaaggcatgcccactactgccaggcacccagggggatcccagccccacctcctcctcctccatgcctgcagaaggcctctccccatcaaggaccacacaaagtgcccctccctgtgcaaggaggaccgggcagctggcctgcagggacccccagggaacacggcgccagccagtcacatggccacagaccagctcaccctcacgatctgcttccctctttcacttctgcaaagttggggtgggggtacaaacagaatagaggaagggctgcctgcggtcccctgcagcttcgttttgagaagttcctggctttcccctttctcacctcatccagctcccatacagggggaaagcaccccggccccctctctacccagtgaagggcaaatgtctctcctgaagacacacacaccccttcacactacccaaccccagcctctggcagcctctggaggaaggaatgtccgggtgaggaagggaaagcaggtgtcccaggacccgcgtggggcagggcgggttccgcggagcggcggggcggggcagcaggcggaggaacctgagggcaggtcggggcaggccacccccctcgcacacctgaaaatccctctctgacaaacagctggaactcccccacgcccccctgagggtgggaacttctgggaagggggctgggtggcaggggctgactcagcctgccaaacccggctggctggctggcgagcgggggcggccgcgtgcacgtggcaggggcggcgcgggggcagggcgggggggctcacttacttggatgggcgccgtgctgaaatggatcttccggctcggggctgggtcctcctcctccgacagccccgggatctccacgcaccccgactcgggctcgtaggggggctccccatcctcctcgtcgtcttcgtcgtcctcctccagggcactgcccgcagagtcctccccgagcccactgtaggcgctcacgtccaccaagtccgcctccgagaagtcctccttcttggattcatctacctcctcaggggccacgtccggggcccggccattgcccacccccctctctggcggcgctaccgccgccgcctccttctccggggccgcttgggcctttggctcctcgggcgcggggctggctgcagttgccacggtgctgccattctccagggccgcgtggaccgtaacctcggcctggatcacctccccgggcgccgactcggcctccgactccccgctctcctccacctccaccggcttaatcttgcgcacctcccggggcttggggggcggccgggcaggggccactcggtgctgcgggggctgctgccctgcggggcatcgctctttctcggccggggcatcccccgacggggcgggcggcggcggcggcgggggctggaacacccgggaccgcttgctgaccagcttcgagttgacctggggaacccctgcggccctggggagcccgggcccgcggtggaggccggtcctcgagtcggccttctcgaagacggcgctgagctggctgaccgtgggggacacggcgtcagcgtccagcttgtccagcgcctcggtgctgccgttgaagcgcaccacgacgtccagcttccggtcctgcaggccggcgcgctcctgcctcagcagccgccgcgccgcggcctccttgtcgccgcctgcggccgctggggcgctccgttcgaacagcttccgcgtctcctgcagccgggacggcgggtgcggcggcggcgcaggctgcgcggagggcgcgggcttggagtcgaagcggctcacgcgctccgacacgctggtgcccagcttcagcagggcgctgtggtccacgttctcgttcaggctgctggcccgcggcagcgacaggcgcacgccgcgctcggacgcccgtggggcctcggccaggcccgcgccgccgcccgcctcgcccgagggccccgccgtcgtgcccatctgcaggaacatacttttgatgcggtggacgttggagccatatttcttgtggtgggcccccttgggtgcctcgtcgggcccgggcgcgtcgggcggcttcagcgcctggatgcccgcctcgtaggcgctgcggtgcggggaggcgctccggaggggacccccgggcccccgtggctccgtcttcatcatggtggggggagccgggttcgcatgcccctgctccccgctcccccgcttcaacaggcggctggccaagtcgggaccaccgccccctccccccgataaaagaaaccccgaaggccttttttagggtccccccaaaaccaagctgccaaaaacagttaatcccgctttaaaaaaaaaaatgaaaaaaaaaaaatctccaagcgccctgtgtgtgggtcgcctcccccaatcaagctgccgaagacagccagccccgcttcaaaagcccgagcggcctggtacggtcgcccccacccaaattagcaaagcggcgtctggggccggtgggagcgcgcgccctgcccgcgaagcagccgcggtgtcgccggctcacatcgtccgagacggtgtcagcggggctggcagcccgggcgtcccccagtccggccggaggcctcggctctcggggggcccggcaccccaacgcccatggctgctccgccggcccgggccgctccgccgccgcgcctccctccctccctccctcccccccgtgccccgagcctcggtctttctctggctttgcccgagcggcggctgccggagaccgagcggctgcccttctcgcagccgccgctgggggactggcacctctgggtcctaaagggatcggatttccggggccggagcctgtgagccctccccttcccctccacccgaacggatcccctcccctccccagccctcgcggagagccttccgctgcccccggacgttggccagcactcttcaacctgcttccatcacaacttctgactgcggtcacaacccacagaaccgcacctccatgaaatattggggggaggcagtacatccacgatggtctcagtgtgaggggagggggtttgtagggaggggcagaggttcattcttcagtgtcctcggagctagctcttcggtgtgcttcaagcctttagcatcagaatcgctgggcacttggtaaaaatgcagatttctgggatctctctcgaaccttgtgaaggagaatctccgaggctgaacccaggaatctgcattttaacacttcactacaggcaatctttggcccccttggaggtgtgaaaccttggtccagcgctggtgacctttcgatggtgggggaggggtggtgaagaaaggaggtgaaccccgtcatccaagtagcaggggatcaccaaaactgccgaagtctggaaaggatgtcctgtcgcctgtctgctgtgcacccgtcttcaggcccctaccctggcactcctgcctctcaaaccggaaggaagggtttgggagcaggaattcgagaggcctggggccaaagtttcgccagtgagagctctaacttgggtctctgatttaaaggatcctggccactgtgttccggttggggtgggggggtggggagggtgacagtgacttacacatcccctgtcctggcaacccagaaagctgtttgatgccctctgcaccccccgcatacacagctagggtgctggcgctgcctgggccctgggtgtgagagtccgccctctggacaggtccaggtgagctggttcattccacacatcccagaaactggtgaacacaatgggccctaggacccagagaacaactcaggcacaaagcctccccccactcccagctgcttcctgcatctcaggcctttctgcggcctctgcctcctcccccgccctcttcccctccatcctcttcctccttttcctaatctcccactctctcccccctggcctggaagggctggcaaagggagccctcctaccactccactgcaggggtgtgtgtgggttttgtgggatattaacgcgttaccatgtgcaaaagagcttagagtacagcgtgggggatggggtgtggggaagccgcctgggaaccctggatattgggatcgggaggggccaggaaccgcaggactgatcctgaggctggtgctaaggaagagggaagatctaggttgtgagctagagccggaagtgaacccagacctcacactttccaaatgccacctgcatctttgcccagttgcccaggaaacttacccctccccagttttgcactttgggatggtgcagggtgaagaagtctgtctcctaacccttcttagaaggcctctgtcaggagcaagctttgggacttagatttccaaactcaagattgggtcttgaaaacccctccccacaggccccccaaccccaatatagaagtccggagaagacagaaacctcacccagttggggtttggaagtttgtacaatgtactcagaagctcttgtgtggattggaggagggcgcaggcccctgtgttctgcccagaatctcccacacccttggtggtagatcatcttaactggtcccagcccaaggggtctgtgcccacgcgtctggccaggtggggaagcccccagtttctgagggtgggagaaggagctgagaaccagctaccaggcccagagaccctcggactcccagcatttccggtagcagcttagagcaaactggaattacaggggtgctcttgggtctcccttgtccaaaggattatgaatctccggacaaacccctttaacagacccttctagggggtttgggcttcaagagggtggagctagccagagcttgggggactgaggctaatcagtgggattattatttcatgggctcctggttagcagagcaacaccctggccagaattcccaaagacgcttttatggagcggtaagtgcttcaccatcacttgttctctggtgtcaggcaccaagccggctggcctgtgagatgggtgaagaatggggtctcattccctccatcccttctctgcctgtctggagcagtaatcgcacctgataggaacaaggagggtttgggagggttaccatccaaactgaaggctttaaatagaattttcattcattgggctgtcatcttcacctacatcctccagtgaggaagcactccaggataatttaaccaccctttctctttcctttgtcttcatggaagagactttgatggccaagttgcccagtggtctttggatggaagttccttccttacctttgccttggcatagagtggttgacctaggagccaggctgctagggttcaaatcttggcttcactgcttactggctgtgtgaccttggacaagtcacttatcctcctctgtgccctgggaggatgaaagaaggcccagaaaggacgagagtggctcggacacagaagatagggtgtgggggaggagacgcctttcccagcctgtgctaaaaaggccagaggctgcgataggcagagataattcacccccaactctcctcctggtaaccgcccccctgccacagctttcccacacccccccaaatctgcttagggcccttgggaagatgctctgttaggactcttccccaaggcttgctagttttaaacaccaggtgtaactgcaaagatagtgatgaaggcagggagaggcctgacgagcgataagtcccgagccctcagcgccctgggcgcaggcccgggctgggtgccaaggctggcttctctttccagccctggggccttgagactcagcttctaaaagcggtttttccttggccacggtcatctaagcagaggctggcccagaccctgcacttggatccttttgtggtgagccagtggtccccacccagttgctctccttcaagagttgacctctgccagggatttgggctggttataggatgctggaaaggtatgctggaaaggtgtgtgtacacctcaaatccaggatgtcagtgttggaggggcctttagtggcccttggctgacctcttcacagggagaatgacgaaagctgagaagtgacatacctagttttaaaggaaacagaccaggctagggttcatgaggcctgaattgagtcctagctgcactcatttgctggatgaccgtgggctagtcgtgtcccctcccaaagcctgtttcctcaaaaagcttagcttgagtgtctgagtgtttcctgagcatagataaccctaggtgtccctcacttttgtgcatgcagcacaggccttgaagccaggccatctctgttagaatctccaacctcccactccccagctaaggggcttcaacaaattccttcatctataagatgaagataatataccaacttcatagagtttttgtgaggaataaatgggtcctcaatgcataaggcactaaaagggggctcagagtgttggctgttactgattgcagggtatccaagcacatgtgggggtgtgtgcctgcatgcacatgtgggcaggtgtggctgagaatgaaactcggtgtttgcatctctctgtgtgtcttcacaggactttggggctctcattttctttaaggttcaatatgtgaaattctgaaatataaacaccccttgcttacagcttctccaaatctttgggggtcattcttgggatgacctctcttctctacttcccaaagggtttttcactcctgcctgtgggtgcctcaagcccctcattgtccctgcagggagaggggtcccttagggtcctctcacagctaggagactgccttgctgctggttccctctgctgtacccagtttctttctatcactctccacacttgctccagtggctcttggaaagttcagatacatcttggagactagggagggagacttggtaggaggagtcagggtgtgtgtgtgtgttggggggcgggggaaggggttggacagaggaaagatttctccaaatcatcagttgctttaaaagaaagcctatatttagctgggcttagagggcctgtaaatatgtattttgcaaggcagacagcccgtagctgtgggagctccagagatatgcagggaggtcaaagaaaaaaaaaataatcagaaagattaggcaatatattttgtcatcagcagattcaaaaaactctactgcctgctctcactgctaataatacacatttctgtgtttcgatggttcctatgtttcatctgccctccagatcttgtgcagtgggtgcctgagaaggagactggctctcggagacaccttttcctgccagcctttgcctcatctgccctgggtcagaggaaacagcatcccaccatctccatccccactagcccgccaggctctgcctggcgcaggtacagcctccagaacaccagctctcaggtctcccacgctcagtgcccagcacgcaggtggctttggggtgaggtgtggggtgagaaatcctgcacttcagggcagttctacttcagagacctcttttttcctacaaaaatgttcattaattgtttttttacttttactttgaaaagtttctttaacagtaagaggccttcaaagaatcatgtgacagaatttacaaatgctagcaatgtgtcatttttgctttgggtttttacatataaaagagaatatttggccggcccggtgactcacaccacccagtgccataatcccagcactttggaaggccgaggagggcggatcacgaggtcaggagatcgagaccatcctggctaacagtgaaaccctgtctctactaaaaatacacaaaaaaattagctgggcatggtggcaggtgcctgtagtcccagctactcgggaggctgaggcaggagaatggcgagaacccggcaggcggagcttgcagtgagccgagatcgtgccattgcactacagcctgggcaacaagagcaaaactccgtctcaaaaaaaagtatatatatatatttgagcccccttttctttctccccagttccattgtccacctcccccaacactcacacatttggaatacagcttttctagaccataatttttgcattactatattttaattgtagcagactagagatataaaattcaccattttggccaggcgcagtggctcacgtctgtaatcccagcactttgggaggccgaggcgggcagatcacgaggtcaggagatcaagaccatcctggctgacacggtgaaaccccatctctactaaaaatacaagaaaaattagccgggcatggtggcgggcgcctgtagtcccagctactcgggaggctgaggcaggagaatggcttgaacctgggaggtggagcttgcagtgagctgagatcgcgccactgcactccagtctgggcgacagagcgagactctgtctcaaaaataaacaaataaataaataaaataaaattcaccattcagtgtgtacaggtcactggcattaagtacaatcaccttgttgtggagccatcaccaccatctatctctagaacttactttcatcttccagagctaaaactccatacccatataagtccccattcccctcttctgcctcccaggttcaagcaattcttctgcctcagcctcctgagtagctagtattacaggcccgcaccaccatgccaggctaatttttgtatttttagtagaggcgggggttttaccatgttggccaggctggtctcgaactcctgacctcaggtaatctgcccgcctcagcctcccagagtgctgggattacaggcatgagccactgtgcctggtctagaattatgtattttaaaaatgtatgtaacaaaggcaggtacagtggctcatgcctataatcccagcactttgggaggctgaggcaggaggatcacttgaggccaggatttcaagcccagcctgggcaacacggcaagaccctgtctctacaaaaaaataaaaaattagccagatgtggtggtgcacctatagtcctgactactcaggagactgaagtgggagaatcacttgagcccaggagttccaggctgcagtgagctatgactgtgcttctgcactccagcctgggtgacagagcaagaccctgaaaaaaaaaaaaaattatgcaatggccatcatactatgtggatcatttttccagtcaacatgtttttttcacaatgtagccacatttgttcatttgatttgttcattttaacttctgtttattattttatcagaagaataagccacaatatatttatcaattgggtgtttaggttgtctctatgttttgttattattgctatttatttatttttgagatggagtctcgctctgtcgctcaggctggagtacaatggcacaatcttggctcactgcaacctccgcctcccaggttcaagcgattctcctacctcagcctcccgagtagcagggattacaggcacatgccactgcgcctggctaatttttgtatttttagcagagacagggtttcaccatgttggccagactggtctcaaactcctgagctcaagtgatctgcctgcctcagcttcccaaagtgctgggattacaggcatgagccattgcaccgggcctgttttgctgttatataaacagggcttcaatgaacatgcttggacttttctctgaacccattattagggcatatacttagaaagctaggattgtcgggcaggcacactttgaagttgactagtactgccaaactgctctctacagcgtctgaaccaattgatcctctcaccaccagcgtttgtacaagacatcctgttttaccacatccttgccaacttttgctcttgttagacttatgtttgccaatctgataggcatgaagtggcatctcatttgaagctgcattccctgcctatgaggctgagcatcttattctcattgaccatgtgggtttcctctaggcaaatcacttatgttcatatcctttgctatcctattgtagttttcggtgcaagttacaacagaaagcccaactagaaggggtttaagcaaaaaggaacgtttattagctcacgtaacaagaagtcctgggggtggttaattcagaggcctggctgtgacatcaaggaccaggttctttttgtctttttccaacaccctctcattgtgttgatttgcctcttagactggctccctcatggtcccaagatggctgccttaactctcttgtgcagacaacaacgtcagagaccgaagaaactggatgctttcttattagtctctttcccaggggtccccaccaggagaccttccagaattgcataaacgtccacacctaaaccaatcattgaccagaggaactaaattagcatgctatatttagaccaatcatcattcacctgatggggttgaggaaggccgagcctcccacaaagcccaaacacctgaatcagaatggggttctgattatcaaggaagaaggaagggatgctatttggagtggcacaaaaaatgtctgtccttactacttgatgagtaccttgaaagaaaaaaataggccaggtttggtggctcacacctgtaatcttggcattttgggaggccaaggtgggaagactgcttgagcccaggagtttcagacaaggctgagcaacatggtgagaccccatctctaccaaatatatatatatgttatatatatgtgatatatatagatatatatgttatatatatgttatgtatatatgtcatatatatatgttttatatatatattagccgggcatagtggcatgtgcctgtagtcacagctacttgggaggctgatgtggaaagatcacttgagcctggaggggcagaggttgcagtgagccgaggttgtgtcactgcattccagcctgagcgacagagcgagaccctgtttcaaaaaaaaaaaaaaaagaagaaataaaaataaaataaaagttctgtcttttccatattgattcctaattcctaggaggtttttttttttttttttcagatggagtttcgctcttgttgcccaggctagagtgggatggcgcaatcttggctcaccgcaacatctgcctcccaggttcaagcaattctcctgcctcagcctcccaagtagctgggattacaggtgcgcaccaccacacccagctaattttgtagattcctaggaggtctgtatattctgaatgctaaccctttatctgttgtgtatgctgtcaccattgccacctaggctgctccttgtctcttaactttctttgtaatatcattttcatagcagagggcttttggggggtaatgtaataaaaatcggctgatcttttttgagtgtgtctcttgtctaagaaatgctttcctacccttaggtctcctacattttctcctaattattttaaagttttgtttttcacttttaggtctttaatccatctggaattcatatttatggatggtgtgaagatttttcataggaaaagccaattgtcacaacacattttactgaagtctattctttctcactgagttgcagtgccgccactatcataaatcacattcccacatatacttggatctgtttctgggcactctattctattgattcctttgtctagcccggcaccgataccacattgttttaattactatcgctttcaaaaaagtcttggtatttgttagggccaggtctctttccttattctttttcagaactgtctacttttttcttgggtctttgctcttctctatgaattttagaatcagtttgcctagccctgtgaaaaatcctgttggaatatttattggacctgcaatgaatcaacagattaacgtggagagaatcgtcttcataacatggaggcatctcatacttaacctaatacttctctatggctctccatttattactattgtagcctatgttttacttcctaaatatcttgcaatgtgttttgtaatttttttctgggttttgtacaattttaattttattgtgaatgatttctttttgaaagatactacaatttctaataaactattgctagtgcgtagaaacactgctgaattttatatggttttttgtatttggatgttgacatttgtccagcatgacttcacttaatcactctaataatatgcccgtagaatctcttgattttccatataaataatcatgctgtctacagatgtcagagacttttgcctcttattttcctaacccttcttttttaaatttttttttttgagacggagtctcgctctgtcacccaggctggagtgcaatggcgtgatctcaactcactgcaacctctgcctcccgggttcaagagattctcctgcctcagcctcctgattagctgggattacaggtgcccaccacgacgcccagctaattatttttagtagagatggggtttcaccatgttggccaggctggtctggaactcctgatctcgtgatctacccacctcggcctcccaaagtgctgggattacaggtgtgagcccccgtgcctggtcttattttcctaatccttctatcagtgaatggtggcttctaaatctgaccttttccagctcttgggctgtgcctgtgggctggccctgggcagctattaccttgcactgtcagttataaataaataaaacacccttactttctccagagctttacagtttgcaaagcgctttcgcttccattatctcattgatccttcttacccccacttgatggaatgggagtgtctgggtggaaacggtccagggctccgtgtccagagatccagctgtgcagccatagtgccgaggcacctcggacagtccctcctcttctctcttactcctgtaatctaacgtttggccgggaatggtccctggcattccaactcatgtgtgatggatttgggcggtcagaggctcacggaacgctttgagggctgaaatccaccgataaaaaggcgggggattctgggtacatttaggtctccaggctggtatcccaaaatgtctggggggatatggaaatgtccttggaagtcggaggcttgatacagatggtgggatgggtggaggtgggatggggaagagatcattatgtccagccccctgcctccgtgcggcttctcctccccctgtagattagagcgttttctgggtcgggaaggggaggacgagatggagctcgtggccttgggttccctcctgcgtcgccccctgtaactgcgtcccccagcacgcactgctgacgcgcatccccagcccggggcggcgcgctccgcaggcatcccgcccccgactcccgctccgtcccaacatcgcgcaggcgcaagaccgggctggcgccagcgaacgcgccctctcgtggcggactggccaggtcgcagtctttgttgttgcgctggaggcggcgtacgggacaggggagaaagatgtgggtggagtctgggaggcagatgcgagaatcagatcacaatgacgagaagccctttcctttgtccctcacggcaacgtatagatgcagataaagaaaacacggcctcagacctcaagagacttagagacaggtgcacagaaactgaagctgaatgagacacactggacagcagtcattcgttcattcagcaaacattcactgggatggggagatacagggacaaaggaccagagggcttacatttaggcactggtgggcagagacggggcagaaagctggagagacggatgcggatgtcaaaaaggccaggacagagaagcgactagctcaggacagggctgggccgcaggagtgaggcggaggccggggaagtaccggcggagcctagggcacggcaagggcaccagctgtgcgaggtggggtacgagccccgacccctccagctctcctgaccgacgccccaactggggatgacaaaacggagagctaaagataggcaatgtgagcaccagaagggaccctagttgcaatggactgaagcagtcagataggtgtaaaccatgtatcatcattctactactaccaaagaagctcggactggccagagtttggaggatgctagggaaacagctctttattcagaaactgtttaatacaggaagagtccagcgtttctcccgtcttccttttacgaactttcccactcagtaaccaaatcgcaaggggcagtttctgtctataattattccagctaataaaggaaggggtgatcagagtgatcaaatctgaatatcactattctgcacacacacaaaaaataaaacgctaatggcggaggcaagacactactaagaccacagaaacgcatgatgtgccttcaaatggaagaacactgtcaccacctatgaagtggtctcaacgaaggaaattgaacataaaccttataaggcctctagatccaactacaaattacagtaacaatgtacaggaaatacaacgtacaggaagtatggaggtgggaggaacatgttaaagatcaccatagagatgcaatcagcaaaatccagagggcaaaaaactacagaagaaattttctggctccttcaaggaacgagaaagagaagggagggagggaaggaaggaaggaaggaaggaaggagagggagggagggaaggaaggaagaaaggagggagggagggagggaaggaaggaagaaaggagggagggagggagagaaggaagaagaaggagggagggagggagagaaggaagaagaaggagggagggagggaaggaaggaaggagggaggaaaggaaggaaagtatgaaggaaggaaggaaggaagggaggaaggaaaaaagagagagaaaggatgtatgggaacctatagatttgaagaaatttaaaagagccttggccaggcacagtggctcacgcccgtaatctcagcactttgtgaggccaaggtgggtggatcacttgaggtcaggagtttgagaccagcctggccaacatggtgaaacccctgggcatggtggcacgtgcctgtaggctgaggcaggagaattgcttgaatctgggaggtggaggtggcagtgagccgagatcatggcactgcactccaacccgggtgacagagcgagactctgtctcaaaaaaaaaaaaaaaaaaagccctataaatcatcaatcagttgcaatgtgtgtatcttctttgtatcttgagtcaaacaaatacactgtaaaaatatgtatgtttatgagaaattggtaatttgaacactagaagtttgatattaaggaattttattgatgatgttaatagctgaacgtgttatgtgattatgttaaaaagagtcattatcatttaaagatacacactgaaatattgatggatgaaattaatcaggaggggtacagatgaaactagactggccatgagttgataattgttgaagccaggtgacagatacacgggggcttattatagtatgctgcaaatttttcaaactaagaagtttaaagaccctgtgacctcccttcccacccctaggcccaatagacagaaggtgctgtgtgttacaagcagcaggttgcaatccagacagctctgagtgggaaggtcctctgatggctgaggggcctgagaagggtttctggggactttctggcttgtgggacagtccctggctcccttgaattgggcagggaggatctgatggggaagtagctgcagcttttcattaaggaaggctggcctctgtgggcctggtgacactggggccaggcactgctaccttaagacagctgagtgggtggctccaaaaatagccagggggacggcagggggcggggagtcacatggagaagctcaggggtgaggctgggcaggtgcccagggggttggcacttctgcctgctcccccagaacccttgggctcttcctctgcctccagaacctttcttcctccctccctctgtctctgagaagacagagagatggccaggtgatgctgggacaaatactgccttgcctgaggggacgctgactctggaatttggtggctctccagggatgagcgggtcagtcaggtggagagagagagaggaagggacaaggactgcgtaacctgcctaccagtcaccccatctgcaggccaacacctgtgcccttaggctggacccaagtgatccttgcctggggtattttgttgtccttttgaggccctggaggagaggtcacacaggcaccaaggatttgggaaccctggcagccataggtccccgcccccttctcagggcacctggggagagtgcccctgtgcctgccctaagtgagagacctggggagaggacaccgcgccccatcgcccctggactgagatcctttggcagaggcaagaaggaaggggaagcagggccgggcaagtacatcagcagcacagtcatcgactgagccaggcactgggctaagccgtccacatgcattctactcatcagcaatgtggccttggggaaggtatacacccctgtgcctcagttttatcatctgttaaatgggcacagtaataatacctgcctcatggaactgctgaggagatggaatgaggtaatataggtagatatatgtaagattctcagcacagtagctggcagcgctagctggtattacccactggcaggtgacctccatgtgggcagaggtttgcttatctttgcaatttcaatgtctgatacatagcaggtgtttcataaatatgcgctgcattcattactttgtggagtcctcacaatgatgccaagaggcaagcactattcttgccagtttatagttgtggaaatgggctagagggcaaatggtgcactcaaggcctcatccccagcaagtggccaaggtggcccacctccaggcctccaagtctatgcgccgaatgaaccctgactccatgggccagagagggtgcctcctccgctcacctgtctctagctggctggtcctgtccagggcttgctagacctccacgctgaagtgcttggactggggataaaggctgggtggatggcacctacgtttgctgttaaggaagctgccgccagccagctacacctactagttaccaggccctgtgccaggcccaaggatacaaacgtgacaagatcctagtcttcgaggagcttggagcagtctgtgtgattgtgttgtgcccaggaaagcacgcaggggctaaggggacacccagcttggcctagcagaagaagggaggtcagaaaggcttcagagaggagaggacatctgtgcagagtctggaaaggtgactggaaggttgctgcttgaatgaaggtgggaagggaactgcaggcagaggcaatagcctggacgacggcttggagacttgagagagtctgccaagctaggcaggagcggagtgaggctgagcaggggcctggggttggaagggtaggggcagaggatgggattctagaccagctgaccaggttcaggacaggccagaaagccaccaactggggatgagctgggaactcaggggccatgagaaccattagagttttaagggaggatggaggtggcctggttggtggtttaaaaaacactgtggccactggaggggacggttggagggacaatgagtgcgaggagggtgtctatcccagatttggtgcatgctccaggcggggaggggaggctgacgctgggacccagctgccccgagccacctccctccttccctcctctcctccctgccccctgtctctgtcactcaccgggcgggccaggccgggcagccatggctgagacactcttctggactcctctcctcgtgggcaagttggggccttgttcagcggggaggcccaggatgagggggcaggatttaggggtggtaagacggaggtgtggagggcccacagaagagggatctgggttgggtgaggcaggcgccagaagggctttggggtgttaatgccatggccagctggggatccagggaatggggctgggagctgggctctgggatgaaggggctgggagctctgagggctggaggtgtcctagggcccgggtgggtctgacagcacaggcccaaagggtcgtgggccctttaatgagctggctgggccgcagcttctaagcccaggctaaatttggccctgggagggagggtggagctggcggccaggtcctctgctcctctcttggacttaggattccttttgctcagctcctactggcctctagggcaggccttcttcttccctgtattttaggggaggaaggtgggggtctccaggcccagaatggctacccttcctcctctgtaggctcctggccccgtcttcctctcctctgggctcttgggcatttagcatgggattcttttcccagtgcctttcacacatacacaccctcacacacacacacacccacacacaccctcacacacaccctcacggcaccctcacacacacaccctcacacacaccctcacacaccctcacacaccctcacacacacaccctcacacaccctcacacaccctcacacacacaccctcacacacaccgtcacacacacaccccacacaccgtcacacacaccccccacacacacccccacatacccccacatacccccacacaccccccgcaaacacacaccccccacacacaccttcacacacacacaccctcacacacaccctctcacacacactcacttgcacacacaccctcacacacatcctcacagaccctcacacataccttcacacacacacccccccacatcccctcacacacacacacaccctcacacacacacttcccagtcaaacatcagtccctgcccactgcaccattaataggggcctaaaacaaggaatggaaaggttgtgggagaggttctccctcgaatcccgaaacccagacgattaaaatgtctagcccagcagggcttgctcccccatccccaccccaatcccttcctgggaggcagcaaaggaagcgcttctctcggtcccttaggggctccaaggacttggtggggaagggagcttatcccctgcccaggactgaggctggcctgtgtgtttgggacttgtggggtccccacagttctcctggcagggctgggggacaccgaggcccagcagaccacgctacacccacttgtgggccgtgtctttgtgcacaccttggaccatgagacgtttctgagccttcctgagcatgtcggtgagcggcctgacaggcacccaggcgggcgggctggggtgtaccccgcagggctcctgctgtgactcgaatcccctctcctcgcttccaccagctgtcccacccgctgtccacatcacctaccacgcccacctccagggacacccagacctgccccggtggctccgctacacccagcgcagcccccaccaccctggcttcctctacggctctgccaccccagaagatcgtgggctccaggtcattgaggtgccgtcagggaccctgagaaaatcacaggggtgggccagagtggcctcctaggagcagccctatgaattgggattgggtgctcattcacagtcatttacatataatttacatacctctaatttggtatctgagtcctctcctgccaggcccccgctgtgccacgtttctcccctaacccacttctcagatgtctttcccatcccccaggtcacagcctacaatcgggacagctttgataccactcggcagaggctggtgctggagattggggacccagaaggtacctctagctgtgccccatcccttccccaccaatgccagtcttggggaatctctcccggagggggagggggctgtggacaggagaggcttggagaggagtggagcagggcatcctggaaagtggggacaaggctctcagggaatgggtgctgggctgggattccaggctctggagttctgttactcgctgcgttgcagagactattgggacttggcttgttggggtctgtgatggatggggcattgaggggcctgaaggggtgtgcagggatgtggggaggagcttcaaggaggctttgcggggcagagctggggctgggtgcagcctgaggtgtccacctggccttcccaggccccctgctgccataccaagccgagttcctggtgcgcagccacgatgcggaggaggtgctgccctcaacacctgccagccgcttcctctcagccttggggggactctgggagcccggagagcttcagctgctcaacgtcacctctgccttggaccgtgggggccgtgtcccccttcccattgagggccgaaaagaagggtaggtgtgcaaccctagaggacttcctgaaagaggaggatgcagcttgtggcgggcatagaacaagggtctccctaatttccaggtggggctttaccacgcacatctccacctcccagcttcacacccctcaccactctcctctggctatacccgcatctccttgtccttccagagcctagaccctagttaccctgaactctgtacttcctggtgcctcatgaggacgtaccagatacatccattaaaagacattccttagtagggagggtaagaccccctagaagaatggggtgccctgtgtactctcaccatgatctcagatctctgggaggactgtgactcctgccagaccccagctgtgccatgttcctcccttaatcctccctcttaggcgtctccctcatcccatccccaggtcatagcctacaattaggaaagtttcaacaacccctggcagagtggtgcctcgtgccccctgcccccactctgctgacagtgacttctatctggtcccagggtatacattaaggtgggttctgcctcacctttttctacttgcctgaagatggtggcatcccccgatagccacgcccgctgtgcccagggccagcctccacttctgtcttgctacgacaccttggcaccccacttccgcgttgactggtgcaatgtgaccctggtgaggagggaccctgggtccgggggtggggtggggcatggcccccatcccagtcccccttccctcccatgctgcttcctatctccgtctctctgattgctccagtcaccatttctttccctgatgctctcagtattgcccacaggcttagtctgaggatacacacacacacacacacacacacacacacacccctgaagttctacctttcccccacaagagggcaacagagtccgcaatccgcatgtggggtctccaactcccgcgccccagatctgcccaggtcaacagctatatcacagtccagttcccaaaccctttccctaccaagggcctctgcgtgacagctctgtctgcttttctgtaaggtgccacctagcaaacccacttacaacaaggatctgatagctcttcacactataaaccaaagatgctcacaacagctctttggatactgagctgaggttcacaggatcccacggctggtgtacactgttcctgtgaattgaccaacagagcagggactcattcagggtccacagccagcgactggtaattgacaacattcttgagcacttgctatgtgcttggcactgtcccatcaacatattttatgctcaccaccactccaggagacaggtgctactattatccttctgacattacaggtgatgaaacagaggcacataatcatcctagctaagcacttgtctgagtctggattcaaaccaggaggtcagaccctagagctgtgcgctaaccagtgcactgtcccgcctctgctggactttgtgtctcctgcctcctagtcctggcccctgccatgttcctggggacctctgtgtccagccagccacttcctgcgtcagccctgagctctctgtgcaggtggataagtcagtgccggagcctgcagatgaggtgcccaccccaggtgatgggatcctggagcatgacccgttcttctgcccacccactgaggccccagaccgtgacttcttggtggatgctctggtcaccctcctggtgcccctgctggtggccctgcttctcaccttgctgctggcctatgtcatgtgctgccggcgggagggaaggtgaatgtgggcatgaagggcgggggagcacctgctggagctcacacccatgggactcacagtggcacttgtgctgtatgggacccagacaccatgggaatggggttctcaggcacaaaaggagtgtggggcccctttctaggcaacttggggcttgagacctgcctggcctggcaccaggagggcattgtggataattgcacacagacctccactcacattggagccctggggcaccttggggcgaaacccagagctgggctaaccctctccttcacttttccacaggctgaagagagacctggctacctccgagtgagtaaaggaaagctgggggtggggtgggagcccacctagacagttgttggaccccgccaccaaactatgccatgaacagcagagacaaaataaataactccagggtgatgctcaccccttcccttgacctctgtaatcccagcactttgggaggctgaggtgggaggattggttgagcctggaagtttgaggccagcctgggcaacacagtgagaccccatctcaacaaaaaaaaaattttttaactagccaggcgtggtggagcatgcctgtggtcccagctacttgggaggctgagataggagaatcgcttgagcctgggagattgaggctgcagtgagccgtaatcgtgccacggcactccagcctgggcgacagagtgaaactctttcccccaaaaaagaaaagcctgttgtgacacaggggaatgggacctgctgccactctgggggaaagggcttgagaagcaacttaagagactcccagtatcagtatgagtcagacacctgcggtccaggccaggctctgccacacaattactctgtcacccttctttctggcttcagatgctccacctgcaagatcacgaggttggactagctggtgtctatgagtgcttccaattctgccagccctttccaaatccttcctctcttattttggcctggtttcccctactcatggccttacccctcctatgtgcccccagccctcttcctctcccaataccctgaaccctagattccaggaggcagatgtgaaataagttatgttccttttattcccactgcactgagccaatggcggtcttggcacccctgactgcttgcctggcctgcctcattaattgcagtggcacttggccacccttcgaacccccttgataagccgcttgtgcccctgtttggagcccagtagtgacctgtgctgtccaaaggggcgctgcccagagcgccacctctgctgtcgttgcctcttgaccttgagcttggacttggaggcctgcttcttgcccagggtgaaggagcctgaggcccccctgccggtcacctgctgagcccttgtccaccagccccttgagcacacgcttgaagtgataggcatttcgggccatgtcgtagcccgtggtggaaacagccttcttcagggtggccagggacacatacttgcaggtccccttgtccgccacagccctcaggatcaccttggacgtgctgggcttctggcagggtttggcacaggtgcgttgcccagtcgctgtcttgctagggacacgctgccctgctggcctccacccatggcagtatttgagttcaacagcactgatggagacagtggcgaagtgcctttctgcttctctccctggggtaggtgaagtgtcttgggtgcaaggacctccagggcggctggaagtctccactgggctgcccctcacaggatggctgaggtgtgtcccggttcctggtcctcgctgaggcttcctcttgagctccggccctcacctttacctgtgtggccagaaagaggatcaaggacggtcacccacggctggcctccacagacttgtgctcttggtgcaggggttggtgaggttatctctgtggtgacctcagaggctaccagaattctgtgtgggtcacagtggccccattgtttcctccggggaggggtggaccggagatgccagatggtggaggcatgtaacatgccaggtgtcctggggaggagggctgcgcttgtgggccagacagcgggcctgcacggtgcgtgcacatatgcatgtgtgtgtgcacatgcctgggcggattttattttttaaaaaatttttagagagagggtctcactttgtcacccaagctggagcacagtggcataatcatagctcactgcaacctcagactccctgggctcaagcgatcctcccatctcagcttcctgagtagctgggactaaagctactgcacctggcctggcccccagttttaaactcaccattttgatcccaccatcttgacccactgggtttttgagccactgggttgaagaatacaagctttgcaggcatcagggttataccaacatttatgaatttttatggggaatatagtttccaaagtgaacagagatgtacgctaagttgacttacgctaagttgacttaattcctcaagcaactttctatacaaagcagttaaaaggctttgcttttattttctgttttcaattttatagaatttttccccatggggatcagtgatttttcatgtacatttcactaggaagattttattcctcaatttttttggactgaaccaaatttaaacactaacatctactggcactggggatattctcttgtgaccagtatttcctccacatccagccttccccgggtcaactctgtagctctgatgttgtcagaaaaatctgctgcctcagtcaatgtgaaatcaataaccgttttaccatgtgcaacgttagccttggctggtttggatttcacgttgatgtatttctacaaaatccaatttttcacttgttcaatgtctgccacttttcagattatccacaagttatgattctgctgcctgcttttcacctagatcagatttcagcggtcacagagtcctccaggccccacgaccctctcctggggatttctgtgccagaggcagtgctttcgggactgtgtgttggtggtggagtgggtgtgggtgagacctaggccacgtgtgtgtgtgtctgtgcgtgtgcctgagtgtgtaggaatgcctgccgtttgtctgtctgcccaagtgctgatgtggaaggaccgtggggaagccactgcggggtctggcctctgctcttgctctagaaaaacatccccagcacatttttccacctgtgtgttgccagagtaatgaggtccagatgtggggctgggaataaggagggggcccactgactgaggccttcctctgccagggcctcacctgcccagctgtctctatctcagcatccacacactggttgctttctttcccctcagtctccccttgcctgggaatagaaaattgggtttcggacaactcagctcactgaattccagactcaagagctcatcttgaccctcccctggccttagatggtgactccacctcttcctgctggcctccccgcaggaggagcatggcccattcagcgtgaagctaggtcttttctgcagtctaaactgtcaggctctaaccggagtctgtgtccactaattgggacctgaacatgggtggggatcacttctcctccctcatctcatcagtaaccaagtggcaagtggggtcgcttcagccctgcctggggccccagctcctctaagaaaaccaattcttggctgggtgcagtggctcatgcctgtaatcccagcactttgggaggcagaggcaggagggtcccttgaggccaggagttcaagaccagcctgaacaacatagtaagacacctgtctctacaaaaaaaattttaaattagccgagcatggtggcttgcacttatagtcccagttactcaggaggctgaggcaggagtatcgcttgagcccaggaggtagaggctgcagtgagctacgattgtgccactgcactgaagttggcgacaaagtgagaccccatctcttaaaaataaataaataatataaaaacataatataaagctcagcaaacactggcttctggaagaatatggcccctgtggatgtctattcatgtctccatatcttgtgagcgcttatcacgtggtgggcactgttgtaaacactcagccacattttctctttcaatcttcacagcagtcctaggaggtaggttttggtttttttttttaaatagagatggggtttcaccatgttggtcaggctggccttgaactcttggcctcaagtgatccacccgcttcggcctcccgaagtgctgggattacaggtgtgagccactgcgcccggcctggtggtaggtgttattatctccatttggccgttgagcaaactaaggcatggagtggttaagcaacttgcccaagacacacagccttgaacccaggctgtctacacccacagcctatgtcttgaccactgggcactgagcaggcaccatagagctttcttttttttgttttttttcttcttttttttactttgagatggagtctcttgcgatctcagctcactgcaacctccgcctcccaggttcaagtgaatctcctgcctcagcctcctgagtagctgggattacaggtgcccaccaccacacctggctaatttttatttttattttttgtagaaacagggtttcaccgtgttggccaggctggtctcgaactcctgacctcaagtgatctgcctgccttggcctcccaaagtgctgggattataggcatgagccaccacgcccggccccatagagctttctgtttgttttctgcccctgcatcatgtgtctgagtctctccccacataagtggtggggaggaccgcagggtggctcagaggcagttccaggctgtactccagggcagctgactcccagagctgatgactccccacctgtgcctccagcatccagatggtccaccactgcaccatccacgggaacacagaggagctgcggcagatggcggccagccgcgaggtgccccggccactctccaccctgcccatgttcaatgtgcacacaggtgagcggctgcctccccgcgtggacagcgcccaggtgcccctcattctggaccagcactgacagcctagccaggtaggtctggtgggtgatgccagccttatttctgggaacaagatggcctttatcacaaggctggggcaaatggtggggtctgggagaggtcaggggaagaggcacatagacttgtctgcccctctgaggccgctgctgggggtcctcaccagtgccagggctatgaccccaatgccaagcactcgcagttggagtgtcagggtggggaagtcaggagaaccagcatctggccctctcagccctccactctctcttcccacagtggttccaggtccagccctgacttcatcctcccttctctgtccacaccacgagtggcacatcccacctgctgattccagctcctggccctcctggaacccaggctctaaacaagcagggagagggggtggggtggggtgagagtgtgtggagtaaggacattcagaataaatatctgctgctctgctcaccaattgctgctggcagcctctcccgtcctcactggctctgtttccctttgtgctttctgggaggccccataggcagccagtgcctgccggcctgccctttggactcttggcattttgctgttttctcaaattctctggaagaaagagggaaggacctgctatctgtagccctcccacgaacctggtagtgaggtatgcctggatcactatccccatttcacagacaaggaaacagagaccaagggagagtcagtgacttacccaaggctacagaacaagcaagtggcaaagcttgaatttgaccctggcacttctgcctccaccctgccttctacagggttgaggggttctggaagcaggaaatccagacccttacctgtagatttctttggcacctcaagattccctggaaggagagtccctctgtctgttgtgtttggagagaagccaatctagatatggagagcgaggccgggcgtggtggcttacacctgtaatcccagcactttgggaggccaaaacaggcagatcacttgaggtcagtagttcgagaccagcctggccaacatagtgaaaccccatctctactaaaaatacaaaaattagccaggcatggtggcacgtacctgtaatccctgctactcgggaggctgaggcaggagaatcacttgaacccaggaggtggagttgcagtgagccgagatcacaccactgcattccagcctgggtgacagagcaaaactctgtctcaaaaaaaaaaaaaaaaaaaaaaagatatggaaagagggaggttggaatgcgggtcccggaatgccctaggctcaaggactaccccccgccttgctgagctcctccagagatgggcaggggtgcagaggacacagcacagcctgggacccttgttggactgagtggtgctagcacagcttgaccccacacgagctcagaagagctcagctggccatgagaaggcctgagcttgtttttcccaggtggacacaaccaaatggggccgattctgccccgatcactgccatctggccatgtccaggctcatatactcccactcccacgtgaggacaggccagggactcagcccgagaggggcccggctaaaagagggatagctggcaaggccctcccctagtggcaactccgagagaacacagacaagggctggcatcaccactccagcctccttctccttttcctctgctgggaggccctggctcccacatccacacaactagcccctcactgcaggttctgtctttgcccaaagggcacctcctcagagaggccttccctgtccccgctgtggtcccactgcggtcccactgcctgccctgcgaggccttcctgctctctgagaggattcgcgctgtctcggctcacatattccgagtcctcttccgcactagaacatacgattctttcagcctgcagcaggtgcagtgcctgcacacagtgagtgctcaggaaggatgttctgaaggaaggcatgaagggataccatgtgtctgggtttgctcagcgttctttcttttagagccagggtctcactacattgcccacgctggtcccgaactcctggcctcaagtggtcctcttgcctcagcctcctgagtagctgggatgaccgctgtgagctaccgttcctgtgctcagtgttcttaaggaggttgctccccttctcagggcacaggggttgagcaaggccatggctaaagcttcttccattatctcctgagcctccctgtacccattagttagtcaatcaactcatcaaacactggtttcgtgagcatctgctgaggcaggctgaggtgtagtgtacgtgcttaataattgcctgttgaatgactagctctttaggtgcccacgccataaccaaacgggttctttgactagcgggtgcctctggcttctccttggctatttctttctttctcctgaaggaaaccaggagttgcgcagaccggaggctccagcagccagcctgctgcctggggtggctccttgatccctgctcccttgaggaggaggctgcccacccctcatctctgggctcgccccctgcagccaggcagctcttgggcctcctgtgctcttcctgtgctggccagggctgggagagtgcaaggccagctcctcacttcccggctttgccttggggtcttggcagcgcctttctctctgctcagctccaaagagcacacgggagcctggctgccggcctgagaggaagcggcccagacaagtagctgggaggatggcgtgcctgcagaagacgctgagccctgcctgggcacacacgtccagaggcccccggcagcatgccgggagggcacagacatacttagcgcctccccactgggcaacagcccctccctggcgtgcaagattccagccagcagtcaagctccaccccccacagcccaggacaaagaagggcagccgcccccaccgccacctccaccgggagacttggcccagctgcacactctgctccacccctgtctcctccagtcccatgatggcattgcccctgttacccagtgggtggcctccaccttccttctaaacacagcacccacacgtggcctgacgctcagacattccctcaccacctctctatcagccagacctggtgactcaagtcgccacctagggccggcctcagccccctgctgcacgctgccccggagcaggactggaatcatgatcctgccacacaacagctggctcagccagctgagggttagtttactcataagatgatcatcataaccgccttggggctgttgtgagaatttgtgggaactggacactctggcagctcccaaggatggacacattattgcatgcaagcacacacaatcccacaaggccagaggtccctggggtctccctggcccctaagattcaggctaaatgaactccatttccacctgcaccttgtaaaaagttcaatctctccctgtgaattgggagtggaagcctaaatttgtatgatctttggtacggaactgctgcctagagctgcaccatccagtacagcagcctcaggccatgtggctactgagcacttaagatgtggctagtccaaactgagatgtacctcagtgtaatggtgaaacgatcggatttggggatacattaggttaaataaaagacattgctaaaattagttttacctgtagatacttatttattcttttgagatgaggtctcattatgttgcccaggctggagtgcagtggcatgaccatagcttactgttacctcaaactcaagtgatcttcctgcctcagccaccaagtagctaggattacaggcactcaccaccacatctggctaatttttgcaattttttttgtagagatagggtctcactgtgttgcccaggctggtctcaaactcctggcctcaagggatcctcctgcatcagcctcccgagtagctaggacatgcactacagcaccagcctttttatcttttttttttttttttttcagatggagtcttgctccattgcccaggctggagtgcagtggcgctatcctggctcactgcaacctccacctccctggttcaagcaatttccctgcctcagcctcccgagtagctgggactacaggcgcacaccaccaggcccagctaattttttttttgtatttttagtagagacaggatttcaccatgttggccagactggtcacaaactcctgacctcaggcaatacgcccgcctcggcctcccaaagtgctgggattagaggcgtgagccaccgcccccagccctttttatctttttttaaatggctgctagatcataaaaaattacatccgcaccttgggttgtatctttattgggctgtgctggtttcatggctcttcctgtatctccatcccagattaactcacacccagaactcagcccctttccctgctttctacagaacacctgctctcctaggcctccgtgaactcagcagcgaagccctggcctgcgggcagagtttgccccacagcagtgaattcatccagaacttgcacgtgtatgtggcctccctctctaaaatgttttagtccccatcatggttctctgtcccttctcattcagtacccccttcccagttcctcccactgtcttttgcagagaaaatcccactttctccagcattagcatgtgccaaactcacctccctcctggccttgccttgcacatcctctgcaaagggttgaaatctctgcatggggagggcctgccaccctcctggacaagacccctcctgcttccaggatcttgcctccctgactgtggacatgccctcggcctgacttgataccctctggagcgcacacaggggaaggggacagggagactcagccttcccagcaccagggctcccactggctgggggacttcaggagagtggtctcctcccacaccgagcccccactaatttttcccacactcctctctgctcccccgccccattcatccatatcacacagacagaccctcctatgccctctgtcatgcccatgtacacatatgtcccaaatgccacagtccatgtgttctcacagttcacacagggttgctttcactgccatacgtgtggggaagctgccctcatcatgcacagatgcccgcccaccccaacccacacacatacatgtgtataggcccctgtgaacacagatacatttatttgtgcacaggtaggtgggcacagacagtgagacacattctcatcaccaggcacccccaggagacagagaccccttggtggcactcaccttgctccctcagacgccatcgcaggcctcctcgtgtggacgctgggcttgacggcagcctcgcattctttcccacgcggcccacgctcacgcctgctccacacacagtctcctcaccccagccggcaagctttcttgcaacccctctcctcctccacccacccagctctgtcattggagaaagtctgggaagctgagagttaaggtgctggggaaaaaaaaaaaaaaggagggaaaatctactgtattccggtgatagaaaatcctgccaggagatggggcttaggtcccaaaagggacccaggattctgagattgcagcagaaattaaaaatccaaatgaagcctcctccctttctagaattttccatctgggcttgactgaaaaatcagccaaaaatcaggagcctggtccttctcacagagaagacaaaggtgagtctgacagagcggcaggctctgtgacaccctgcaggagatagtgagggtctcggggagcgggtctgggtggctgtatttagggcggctgtgatgtcagcggaaaggagggtttgagttgggaatgtggcacaatggcccctttgtccccctcccctcctgtcctgtacacactgaaaccacacaccggccccacaccacgtgatgcaggctcagagctgcccatggggcactgccacacaaggctgcccccgctgcagccctgacccacagtgcgtgtgtccacatacatgcccacgcgtgtgcacacacacccacgtacccacatgtagatttgtacagaggtgacaagaggcatattcactcctttgcctacagctctgctgccccgtatggtaacccttatcccacatatagttagtaaaactaattgcaattcagtaaaagtggaaactgcattcctcagtcacactaactgcatctcacatgctcaacagctgcatgtggttagcggctaccgcactgggcggtgcagctctaggacatgtctgttgctgcagaaagccctgccctgcgccctccgttgctgtctgctcccccatgggccttccacttgctcttcctctcacactcgctcactcctgtgcaccaagcacacacagcgccatgctctcacctaatgggtggcctctctagctcagtctctctctctttagtctccccagtacctaagcacagactctgcctagccctgcattgcaacacctggcctctagtctggagagaataacaggatggaaacatgaccacatccacaatcctaggatgaaggaccgaggggagctatgtggatctggagagctttggaaactcagaggggctgagctcaggctgggttgggcaagggaatgggaagagaatgagacatttgagcatggcccggacagtagggtgttgagcatgcagagagaaaggacatctagaaggcctggaagtggggaaatgcagtgcatttgtgagaactgttggccaccctttttggttggtgtgacagatgtgggcaggggaggggacagtgagcctgggcaggtgggtagtggccaggtagagccttggatgccaggctcaggatgtccctgggtcccccacgagggcagatggggatgtggcctggacagccagggtcctaaagtcccagaggtccaagtggacagggtttcctgggcagcatggcaggcatcaccaagcaatcaacacattgatcaagagatggagcctggtgctgtggctcatgtccgcaatcccagcactttgagaggctgaggcaggtggatcacttgaggccaggagttcgagaccaggctggctaacatggtaaaaccctgactctactaaaaatataaaaattagctgggcgtggtagtgcatggctgtcatcccagttacttgggaggctgaggcatgagaattgcttgaacctgggaggcggaggttgcagtgagctgagactgcgccaccgcactccagcctgggtgacagagtgagactctgtctcaaaaaaaagagagaaagagagatggataggcatcacacaactttgggtaatttgcatatgaataagccttcatttatatgccatcattcttatcctctctacactgattccctttctacactgtcctaagtgtggtagaagtgctaatgatgaattattgaaggccataatgaacggccatgaatacttaatgacatcacgatattagtattgctgatggatggtatctacagacttgtccatctctctggagaccttagggaggagtgcgggctttttgttctttttgggtttagacctgagatgaggtgagagaggtgaccagctgtcgtctcgctgtctccctggctccgggtgcctggttctctctggacttctgacgccctggattctctgtcccccgctgaccacactcgctgtcccccttacctgagatgggggagccgaacagtcaccttccctccgggcctcgccttctcagggcctctgggaaggagcaggcagaaggtgaagggaaagagaagggacggagaagaggggggaagaggaagcaagaatttaagaaaaaaaagaaagaaagaaagaaaaagcttaaaaaggagtaggcgggaggcgggggcacgatggttccccagaccaccccagcccaggggggttgtgttctggggattcaggaggtcgaggcacccagtccgtggtgagcagggccaggtctccttccttcccaagagcacggtgcgagtgccttccccacagctctcccaggtgtctgtctccctcactcccccagggccaggacagcgagcagggagcacgccttcctcctggtccctcccagaccctcgccaggctcagcagacccctctcctgttgcgttgctccttcggcaggaggtcagcgtgggtgagaagggagcagaggccagatgacccttcatgtcagttcaaggagaggcccccaggtcctcctcacgggttccactcccctcaccctcccagtatccatgagcatcccaccgccaccaagtgcagggcatccagggggtggagagtggatgggcttgaaggggagtgggtatgaggtttggacaaccccagatgtgaagagtgtgtgtgtgtgttgtgcacgtggattgcctgtatggtattgcaggggagaagaggatttggaaaaggtgcaaggaaattgcaagaatagaaaatgaaagaggaagtagaaaggtttgcggtataagaagggtgagagaaaggggagtggggttatggagggatctagaagagaatagtggggagggaaagggcaggaatggaaggcaagcccatcaccccaaagccccttccccatgtctacccctcccccaactccaaagaaggaaattaggaggccactgcggattatgtttgggtcatttccacatgctttattccagcaatcaaaataattaaaaacatctcaaattattatacacatacaaaataggtacagagtcttttgcttcctcccacccctagggggaaaaactgctttgtgctttgggaagttgtctctgaaacccggggacagaggacgcaggacagactaggagggagccgggaggatgggctgcagctgtggaggagggtttcagaggagagaggtcggagagcagaggcctgagaagccagaggcaggtggagagagggtggaaagtgagcagcgggctgggctggagccgcacacgctctcctcccatgttaaatagcacctttagaaaaattcacaagtccccatccacaaaaaaaaaaaaaaaaaaagaaaaatatcaaggaataaaaatagactttgaacaaaaaggaacatttgctggcctgggggggcatctcaatttctatagcaccagtgattccctccccaccccacccatcacatagatgtagcacctttggtataaaatggggagccgcttccaccctgcccccatccccgcccccaggcagttgccccggtgacacatcaagacaagaacgaggtagtctttcagcaacacagttacacaaggaacagaacagtctctcccgcccagccctgcggcacaagggattgacacgcgttccccaaatccgatgtttctgctttgtcgtggcccttcctgactctcctccgaacccagtgaggggctggtggctcccccggcatgaccccctcaaaaacgaaggggagatgttgcaagagccatgggagcgccagatggcaaggcttctttggcagtctgagaaccccaggtcccccagggcctgggggtgctgggcgggcaggagcgggctgagggtgggggccacttgggtgtttgagcattgcctttgattgctgggcagacaatacattgtttcctgtgtcttctggggagacagatttgggaaggagtggaggggaggccccaaggggggtgtggagaaaggagcagaaagggcagcattggggtttcataagcccaacgggcagaaagggacttacccccgcatgggtcttcaagcaagtggaccaagcttccttttttaaaaagttatttatttattctttttttttttttttttttggtaaggttgaatgcacttttggtttttggtcatgttcggttggtcaaagataaaaactaagtttgagagatgaatgcaaaggaaaaaaatattttccaaagtccatgtgaaattgtctcccattttttggcttttgagggggttcagtttgggttgcttgtctgtttccgggttggggggaaagttggttgggtgggagggagccaggttgggatggagggagtttacaggaagcagacagggccaacgtcgaagccgaattcctggtctggggcaccaacgtccaagggggccacatcgatgatgggcaggcgggaggtcttggtggttttgtattcaatcactgtcttgccccaggctccggtgtgactctggggtggggcggagacaacgggagggggcattaccacgtgggagtgatggagagagggcactatggcctggccaaaaagcccaaggccggagaggtggggccctgcctggggattctgggcactcaccgtgcagccatcgacagtgacgctgtaggtgaagcggctgttgccctcggcgcggatctcgatctcgttggagccctggaggagcagggccttcttgaggttgccagtctgctggtccatgtaggccacgctgttcttgcagtggtaggtgatgttctgggaggcctcggtggacatcaggcgcaggaaggtcagctggatggccacatcggcagggtcggagccctggccgccatactcgaactgcaggggaggggagagagggaagagtgagccgctatgcgggaacctctagtcctgcctggcctccctgtccagggtcctcagagagctgcccaatgcaccgttatatcgagaggaggcaccacctgcccatcggcagcctgtgtctgaaccactatcagggacctgagacccctgcctcccagcccagctctgtccatcacccttagcagagacctactccaggacttcatgtcccttctgagcactgggctagcccatctcctaacactggctctgaggtccagctcacgcacctggaatccatcggtcatgctctcgccgaaccagacatgcctcttgtccttggggttcttgctgatgtaccagttcttctgggccacactgggctgagtggggtacacgcaggtctcaccagtctccatgttgcagaagactttgatggcatccaggttgcagccttggttggggtcaatccagtactctcctgtggtagggcagggcaagatggagtcagggaaagggagcagccagcaccatatggtaggggcacatatgggcatggggaccctggcatggcaggagtaggagggagggagaggctagggcaggccctcaccactcttccagtcagagtggcacatcttgaggtcacggcaggtgcgggcggggttcttgcggctgccctctgggctccggatgttctcgatctgctggctcaggctcttgagggtggtgtccacctcgaggtcacggtcacgaaccacattggcatcatcagcccggtagtagcggccaccatcgtgagccttctcttgaggtggctggggcaggaagctgaagtcgaaaccagcgctgggaggaccagggggaccaggaggtccaggagggccggggggaccctgcacagagagggaagagagtggggattaccggcatccaagtgctttgggggctggagggccatgagcagaggggatgaggggctacatacaacaggaccagcatcaccagtgcgaccgcgaggaccagggggcccaatggggccagggagaccgttgagtccatctttgccaggagcaccagcagagccagggggaccctggagtgggggaaatggtttgagaaaggctgccagaagcccgaacaaccccagctctggaggagaggcccaccaccctccctgctggctctggccccacggctcatagagccagcctcagcctctttccataggacatgccatagctcctcccagccgctgagccaggggaggacggattggggagcagagaggccaaagctagatcagattgtttgttcaggattcttcctctctttgcccactccctgtccctgaacccttctccagagaggcaaagggtgcctgggtccctggcaagggtccccgaggtgagcctgggcttggggctcaggaagaggagagagaaggcatgacttactcggggaccagcaggaccagaggctccagagggaccttgttcaccaggagagccctgaaggacagataaaaaaggcagttcaggcccagtgagcgtcaaatgtagcctgagggcctggctggagagacaagggcagtgtgggcaacccatgccccttcattattctggaaatctagcccgagggtgtccataggcagagacctctcccataatccctctctgtgtacccctcaccctctcagaagctacttggacatgcccacaaatcttcagaccccagtccccactagggaggggaaagaatgactatccagagggggaaactgaggcgaagctccccctcctatcccacagcacagcatggggactggggaggggctgagcatacttacaggagggccagggggaccctggaggccagagaagccacggtgaccctttatgcctctgtcgccctgttcgcctgtctcacccttgtcaccacgggggccttggggtccctagaagagagaaagggacaaactgtcaggcggaagttccattggcatcgagtggggcactgtctgcatctgtagagttctaaaggcatgggggacacagcagggtacttacggcggggccacgggcgccaacagggccgacaggaccggcgggaccagcaggaccctggggagagcaaggaaagcatgagctcttggccagggaaggctgaggctggggctgcaggatgaggcctcccctctgctggatctctctctcctcagctgcttcccactgtggccatctctcccaactcccagggaaacctccccactgcaatcttcacgggagctggggccaactcatgggagaggcggtcctgtctgggagaggggacttggggctgagctttaactcagttttttggattaaggccctgacatcttgcaggatctcctttcctccccctgcctgggtgaagtccgacacccatccccaggcctctaaggaggcctgaagagtccctggcctgaccaggtacagggaactggagcccagctacttacagtctcaccacgatcaccactcttgccagcagggccaacggggccaggggcaccaggagcaccaggagcaccagggggtccagcggggccggtctcaccacggtcaccctggcggggagagcaggggaatatgggtcagccccgggtgaagggccaggatggggcagggaagcagcagacaaggctgtggtcatggagtgttgccatcttaccttggcgccaggagaaccgtctcgtccaggggaaccttcggcaccaggagccccctgcagagagagagagagagaagtgagagtcagccggggaagagggcttaggcaaggccacaatggccatgctgagggtactggcatgggggctggggactgctcacctcacgtccagattcaccagggggtccagccaatccaggggggcccatgggaccagggggaccacgttcaccacttgctccagagggaccttgtttgccaggttcaccctaagggagaagaaagagtcaggccagagatagggtctgggaggacccttgagtccgctggagtcatctctaccaaatctgttctccttggctccgccccactccaagtcctgtgatggtttttctcagggccccccaaggtgaggggggcacttacagaggggccaggaagaccagggaagcctctctctcctctctgaccaggcaggccgaccacaccacgctgtccagcaataccttgaggcccgggagtaccaggagcaccctttgggaggcaaacaggggtgaggtgccagagagcagcacagggacccctccccagctctgcacacctccggagctgcagagatctgagctggcacttacagcaggaccatcagcaccaggggatcctttctcgccagcagggccagggggaccagggggaccaacttcaccaggacgtccagcagggccagtctcaccacggggacctttgccgccttctttgccagcaggaccaggagggccagggggtccagcatttccctggatgaggataggaggggctgtcagactccagggggctctggtgcatcattgggtcctcagtcagccccaccatccttctggcagcccccacccagcacccccaacctagagcagtggactctgctgcagagacttacagaggggccaggaggaccgactcggccagcagcaccagggaaaccagtagcaccctggaaggagagaacataggaacagtcagagggagaacagccaactcatccgacccagctgccctcacctgccaccgctgcctggggagaggggagaggctcaacagagaggcgggtgatactcacagggggaccagcgctgccgcgagcacctttggctccaggagcaccaacattaccctgtaggagagcacagaggcatcaagcctggacccgtcctgggtcccagcccaccagcctcgtgggcacagagggccaagccactcacaatggggccagggggtccagcgggtccggcagggccagggggaccagcatcgcctttagcaccagcatcaccaggttcgcctttagcaccaggttggccgtcagcaccctgggggaggaagcagggcggtgaatggagggaaggaggcaggagtttccactacctgggggaggagcagtaatggaggcaggaagatgcttgggtgggaaacaatcccgtctccacccttctcccctgaggatggctgacgcctttgtcctcattccgtccctcgaggtcccaggtcccagtcggtgatgaaaaatgatgggggtcttggtactcacaggggggccagcaaagccagcagggccggggggaccaggctcaccacggtctccctagaagaaaaggagtcagattggagagatgcgctgacaggagggaaggcggggatgcggtgaggggagaggcaaggggtgaaggcacagacagggccaggggtgctgtgtgaagggagggaagggccaagtatggggtcttaacaggtcttctgtacttacgggggcaccacgagctccagtgggaccagcagggccgctgggaccactttcaccctgagagcaagggacaagaggctcagggtcagggcctcccctgaatactcctagtagatgaccccaggagagcctcccctccttctggtccctccaggttcccaggttgacagctcagtttggcaggacctgctctcccaacgcaaccccacggaaccgtgcccaggcctgctgaggaggctatgtgttagggcagaaggtggggaggcggccacctcaccttgtcaccaggggcaccagcagggccaggaggaccaatggggccagtcagaccacggacgccatctttgccaggagagccatcagcacctttgggaccagcatcaccctaaagacatggataagcttgagatttccagtgtggggcaaggaggtgacctatagtgttctgcttgtgtctgggtttcctgagaggccctctgcagctctgccctgcctccacctgggccaaggactcaaagattctttcaggaaaaagggtgcctgcctggagactcaggtggaactgaggttaagaggcccctgacttgtgtagcgggatgaataagggagcctccaccaaggagatgcccccacctctcatcaccatggtaacccatggggatagatgggcctggaccacagggagaggattcatcagcaaaaaggccagaggggaaaggggaagaagggaggattagcgagaagagggacagatcccagagagaaggagagatgctgagagattcaaagcaggcagagatgggagccatgtagggctcaggggagggggaaggttgaacttactctgtcacccttaggccctggaagaccagctgcaccacgttcaccaggcattccctgaaggccaggggcgccctggctaccgggagctccaggggcaccagcatcaccctatgtgacaaccaagaagactggagtgaggcctggggccccaagagtgggtcacagccctaagccccgcttggtatctcccaggcttgtttccaaggccaacgacaagccttgagaaaagatgaaaagactcacagcccagactccaggctgtgtgtgggcccctgccctggtcttttccccccaccccacaccctatctccatggctttggtcatggcccgccatcccctgctgcaggaggggtgagacctggtccctgggccacttgccagagccccttccacgctgccctcaccttagcaccatcgttgccgggagcaccgttggcccctcggggaccagcaggaccagggggaccttgcacaccacgctcgccagggaaacctctctcgccctagaagggaaggacagggcatgtgaaggctgctctggagatagggccaagtacgacgcaccttgacggatgcagcgagagaggcctacttactcttgctccagaggggccaggggcgccaaggtctccaggaacaccctgagggggagggagagaggaacagacagtgagcaaaacccacctggggccactctgctggaaagcacggtccttcctcctggggtctggccgtgattagagaggaaccccttctcagcactgaattgagattatcccaaacagcccctctcttcctcctagggatgtgtcaaaggcttcccccctccccaaactatggaccaagatttatcaatagaagggttgagggaaagtcacagcatattccagcagctcttaaaagaagtcacccagactagcaatcatgcagcccccacttccctctgtgctgctcccttcatgggaggaagttctttccggcgtctaacctcaatccctctagttgatggctgtctgattagctaggagcgggggcctgtccctctggattccctgcatctcccacccctctggccggctgctccctcttacctgttcaccaggtttgcctgcttcacctggaggaccagcaggaccagggagaccctgtaggtgggaaatgggggaagaagggagggaaggtttagaatctggaagagaccaaagaggtgtttcctacccctacctcccagcatcctgacagccatgaggcctcacctggaatccgggggagccagcagggccttgttcacctctctcgccagcgggaccctgcacagagagaacactacagtcacggggaggccgaggagacgaggggctgagggtgtctccccttttctgctccccagatctccccatcagggacactcacagcagggccagggggtccctgagctccagcctctccatctttgccagcaggaccctgcagggagagagcaaaggggaactcagggttaggaggccccgagcagctgaggaccgtggcctctagcacccctcctgcagggaggagaaagtgccggggcagcaatgggaaggaggtagggatggaaaggagatacttacgacagcgccagggggtccgggaacacctcgctctccagccttgccgggctctccctgtggagaaagggagttagggttgagggggctgaagtgagaagccagggcctcctggggcctctcatttactctgagtgggactttttaagggactttcttttcaaaagactgtttggcccccggggaatgcccctgcaggtgcttcttgctgggccctttctgagcccactcctcccaagatgcccttccaggctcctctgccttttccctgttagatgcccgctgtggcctgcactgcaaagggctttcatcttctctgctatctccttttggacctcaaagaatccaccaagactgggggtgcctatcatatcaaaggcctgtcctatccccacgtgtcggggtggagggccaccaacaacacttatttccaggacagagcagtggtcatggagcctggagaagtgtttcattttttctttctttctttcttctttttttttttttttgagatggaatctcgcactgttgcccaggctggagtgcaatggcgtgatctcagctcactgcaacctccacctcccgggttcatgcaattctcctgcctcagcctcctgactagctggggttacaggtgcacaccaccacacccagctaatcttttgtatttttagtagagacgtggtttcactatgttggcccgactggtctcaaactcctgacctcatggtctgcccgccttggcctcccaaagtgctgggattacaggcatgagccaccgtgccccgccgagaagtctttcattttacagatagggaggctgaggtccagaaagtgagagtgagtggccacacggcaggtcagcggcacagctgagcccagagcccaggactccttcaagtctcaggtgtgtttgtccctggctcttcatggatcctcacttaatactcacagcagcacctttaggtccagggaatcccatcacaccagcctgaccacgggcaccaggtgggcctgggggtccggggcgaccatcttgaccggcgggaccctaaggatgggaggcacgaaagcagcagtgaggacagcagggaggcagacaggacaatggcagggggttcagggggagtgatacttacaggggggccagttttgccatcaggaccagggctgccagggcttccagtcagaccctagggaggcagagaggtatgagtgggacttggggagaagcatgatggaggtgggggaggactccagagggcagacccttgggcctgatccagaacgcctcatcccagaccctacacgggatggtcagggcctggccaagccaggctgaaagcctggggcctcaccttggcaccaggcagaccagcttcaccgggacgaccagcttcaccaggagatcctttggggccagcagggccaggagaaccacgttcaccagcgggaccctggttgggggaagtcacaggaacagttagggtctcaagtttgtggctctttgccacgggccaaaagaggaagaagatgcccagggagcggcagggtcagccccccggccgcaaggagaggttaccttgggaccagcaacaccatctgcgccagggaaaccacggctaccaggtccaccctgcaggaggagaggaggccagtgaactccgcgacacacaggcaccagccaggcaatgagggtggagcgggagggggcgggcagggacacttacacgctcgccagggggtccgggcaggccagtgggtccgggttcacctcgagctcctcgctttccttcctctccagcagggccagggggtccttgaacaccaacagggccctggagagggccgagaggaggaggcggcctgtggtgaggggccatcctgtgccagcctcagagccggctgaggctgggcctccagtgtcaggggttcctgggggtgtggcagggactcccccagaagactaggggctcctcttcctttctggatttccctcagggggctcctagggcagggtgggctgggctgcaagaaggatggcggggagacttacaggctctcccttagcaccagtgtctcctttgctgccaggagcaccaggttcaccctgcaaggggggagaagaggatgagctgagagtcgggggcgctcagttggcctgcgtcttcctgctccccagatgagagccgcactggagccagtgcatggggtgggcagaagggagagtttggtactcacgctgttacccttgggaccaggagggccgccggggccctggggtccagaggggcctcgggcaccagggaagccaggagcaccagcaataccaggagcaccctgtgggaggcagacagccagggcgtgagcctaggagcagagggaaaggggcaggcaggctgcaggcggcaggagtgggactgaagcctggcaggatacttacattggcacctttagcaccaggctgtccatcagcaccagggtttccctgtggcacagagaaaggagtgtcagcaacaggcaaggactctgaggttagaaagtggcaaaggggacactgagtcggggacacttacagcagggccagcagcaccagcagggccaggggggccaggctcaccacgcacaccctggggaccttcagagcctcggggcccttggggaccagcttcaccctgaatcagaagaaaggacatatcagaagccaccctgggaaacccaaccttgcctctcgggatggcaggaggaaggggagacagggacaggagagcaatgatcaggactctaagatcagagacggagaacccaggacaaaggtgttagtgaacgggctgctctcttgccactctgggtccctttggtttggggaacagggagacatgaaccccttggcccatgagggtcatgcttagaggagagtggggggtctcaccttagcaccaacagcaccagggaagccaggaggaccagcggggccggtgggaccctgtgaatgaaatggagatgtcagcgagaaggaagagatggcagctgcaagtcacaccctgggacagaggaagtcctggggttcagaccaacataacctgctcccattgtcagccccaagagcagatactgagacccctccccactcccaggccctgaggcctacaggccacactcacagggggcccggcagcaccagtagcaccatcatttccacgagcaccctgcaggagagaggggaagccccgttaagtccactgagcactggccagtccctagagttcctggggagccccttccagagctcagggatcccccaaggggccaggagtacttacagcagggccaggggctccagggcgacctctctcaccaggcaggccacgggggccctgacaaccaaaccaagagaagtcagatgagatgggagacagccttgttcccccaggcctccatcttgcccctgcctcctgccccatccctgccctctggaactgggcacactcaccatctgaccaggagctccattttcaccagggctgccaggctcaccctgtagatcagagaataatgagtgagaaattcattcatggtgggactctggggatgtggaggaccatgatgttcagacagcctcttaccttaggaccagcaggaccagcatctcccttggcaccatccaaaccactgaaaccctaaagcaggaaagaggtagaaggtaagaacctgtggagggggtggaacagccttgacatccacctagatctgagaaagagccttgggaggtcatcaccgccatccctttgtttctgagctagactaaaccccaactggctctagatctcacccaatcgtttaatcgggactgctttcccatggagggaggtgcttttggatgtccactctctgtcccttgggacttctgtagctgccacccaccatgatgcaactcagtatcttttggggaagaggttgggactggatgggggtatgctagggacttggggagcttaaatgactcaaaggtgactcactctgtgtcccttcattccagggaggccagctgttccgggcaatcctcgagcaccctggagagagatgaagaagacaaggaagggccattagaacacatcactgtggacccagctcctaaatgaagcccaagtgcagtgaagcccaggttcagccacagccccctgctcacctgaggcccaggaggcccacgctcaccaggacgaccaggttttccagcttccccctgagagggagagaaaagaccatcatgcctctgcctccccaccaccgcctaggggctggaaaagtggagaaggtctcagtcttctttggattgttgcaggtcaggtttgggggcccagaatcttatctttgaatctagagctcagtttaaatctacagtgaaaccttcgtttggtgaaatctgagtgcctctaaaggaatttctgtctacttctgtcaccagcattttaatttcaccatctgcgcaccaatttccccaaagggatggggttggggattgctctaaggtggctggggtgaggagaacagtcactttgttggggacatggaatcatctcactaagcgaaaagatcattgttccagggcagtccgtgcatcagagaggacttgccctccttcctctgagtatcgttcccaaatgtggtggagtggaaattgcaggacccaacccatggaggccatggggtcagatggtatcttcttgctggggatacttacatcatctccattctttccagggggacctgggggacctcggggacccatgggaccctagaaaagatagaagaggtggttagaatatggataagaaaaaaagaaggggaaggctgggattgaagggaagaggtaaggaagaccccaggcctgggagttcttctataggagagtctgtgtgtttgtagaaggagtatgaatctgtatagagagtgcttactgaagctccaggctcgccaggctcaccagggggaccttggaagccttggggacccttgagaagaaggaaaaagatgggttagaagacaagtccctgtcaaccttctccaatcttaccaagagatctctgagcatctctcctgccctcatcccagtcttccctccaaaagaccaaagcccaaggaggcatatgaagacgtcctggatactcacaggtgcaccaggggggccagggagaccacgaggaccagagggaccctatagagggagaagaaaggggggtcatggtgatccctctgtaggaaagcatgtggatgtagtcattcatgcctgttgggaccacccagtcgtcctgcatcctttctggactctgaggtcccaaaggtgatctggacctcccaagctgtctataccagccgcctatgcccacctcctctggatacccattctctcttctgtcatccatgctccccctgctggctcaccatggggccaggcacggaaattcctccggttgatttctcatcatagccataagacagctggggagcaaagttctagaacaaacaagagaagtcagagtgaggacagtgaattgaaaggcagaagacggcactgaggatggaagaaactgacatcatgcacttcctggtgtgatgtgctgagaagaataacattgcttttaagacattcctgcaaagatgcatccctgcatctaatctaatgagacaatcccaaattgagggacagtctgcaaaacaactggactcatcaaaactcccagtgccactaaagacaaagaaagtctgaggaacgttctacatttgtggaaactagagacatgatgattaaacgcaatacataatcctggactggatcccagattggggtggtggggggtggaatctataaaggacattatcgggacatcggtgaactttgaatacggactgcacattagagagtgaatttaatcattgtgtaggtcagttaagagaatgctcttgtttttaggaaaaacacacctaagtatttaggcgcaaaagagcctgatgttagcaacttgctcaaacagttcagaaaaaaaaagatacatatacataaacagagactaataaagcacatgtcacaaactgtgaagggtatgtgagagtttcctgtaggattcttgcaacttttctgtaagtttgaaattatttcaaagtataaaattatgtcatctgccaaaaaacaaaaacaaaacaggggagagtggacacacaaggcctctccacttactcctccgaggccagggggtccgggaggtccggggggtccggggggtccgggaagtccaggctgtccagggatgccatctcggccaggggggcctgcgggtccctgcagggggagagggcggggccggggtgagcgtggggccgagagccatgcccacctgcagccccccacagcccagagtgcaacgcttacccttgggcctcgggggccagtgtctcccttgggtccctgtgggattgggggagaagaaacaagaggccaggttagagaagggaggactgtgaggagtcacgggccgcgcaggggcaaaattcgagggcaggagattacctcgacgccggtggtttcttggtcggtgggtgactctaggggacgaagagacgcgcgttagagccaaggtttgctaatgctgctcccgtcggcagaggcctccagcacggagggccagcgagcgccgaccacccccagccccagccccaggccccaggccccaggccccaggccccaggccccgagcgcagccgcacctgagccgtcggggcagacgggacagcactcgccctcggggacttcggcgccggggcagttcttggtctcgtcacagatcacgtcatcgcacaacaccttgccgttgtcgcagacgcagatccggcagggctcgggtttccacacgtctcggtcatggtacctgaggccgttctgtacgcaggtgattggtgggactgggacaggcggaagaggggcgttgtcagtagtgactgcaacccccagcttaaccacctttcccccgggtctaagaggcacacttggatttttcacttcccgcccctccccccgttcttctttcctcaaatccttaaaagctcgcctgctcctcatcagcgcgggtgacagcgccgaggcgcctggccagggaggctgtaactctttccagttctcaggaatttaaacaaagctttagtccgcggtggcttccaactccaacctcagcccattggcgctgaagccaagtgaaataaaaaccacagggtgagagggggagggcggggggagaataggaggggccccatcgggagggcaggctcgtggggagtggcttgcgtggtagagacaggaggagggcgagggaggagagaagggaggtccagccctcatcccgcccccattccctgggcaggtggggtggcgggggcggggctaggagaatgggagcggctgattggaagggaggcccccccaagacttgaaatgtacctcaaaattaggagacaccctaacctccagcacctagacatcttaaaagcccgctctcggggccatccccagtcccccaaagccagccaatgcctccaggtcacttttagccaaagaaccaaaaagtccgcaaatagtccagaagttagctaaccactcccaccgcgctagcggctccccagacggccactaggtgtcgggcaacgctaagcaatggggccggggcggggccgacctcaccggcccgactacctctttaagaggcttgggctgccccatccctggctttactttccagatctagaggtgggggtccgcacccagcaataacccgggtcttcccgctccggctcctgccccagtaagcgttggaccgggagacgcagtgctcagcatcggtcagcagggggcgcaaggaccccgccccgccgagtccgcgccaaagtttctcatcctccacccgcccacgctccgcaccccctccgcggctgcccagcacccccacggccccagcaacactctagcccgcagagagggcaatctttccttatgaatcatcccacggccttcctgattgcttctacatcttgggcttcaaatgccccgctcggcgcccccatcccatcttcgacgtgctttcctcactctgcacccagatccccacttccccggttgcgcgctcgggattctctcttgcaccaactcacgccgcgctccaccctcacctcccgctcccggggcgcgttcaaccccaacctcgccccagggtgagctccctcctgtctcagggcgccgaggaagagccctcatcatctcccttccattcccgagtctccggatcatccacgtctcgttttaagccgcggcccccgggaccaagcgcaaggcgcgatatagagtatccttgcactcccaaaagtttgggacttactgtcttcgtcttggccctcgacttggccttcctcttggccgtgcgtcaggagggcggtggccgctaagaggagcaggagccggaggtccacaaagctgaacatgtctagaccctagacatgtagactctttgtggctggggagggggttagcgtccgctcatgcgtggcctcacactccgcgtgcctcctgctccgaccccgaggagaaactcccgtctgctccgacgactggcccgggccccttttatactgtcctgatggagagcagggaggaaccctgcccctcggagagggggagccggccgcccgtgccccagccaatcagagctgcctggcccggcccccaatttgggagttggaatggagagggggaggaggagggaagggagtccaccccacatctcccctcttcgcagctctgcctccccagccccccagcccagcctgggccagaggtgctgtggtaggggtgcagctgggtcctcagaatggcgtgggctaaccagtgggtaggggtgcccctctgctctcttcctgggacctccaatctagaagaagtggaactggggaactggggagctgggtggggagacttccaaaggtggaagggttgggggtgttggggagggggtcctcctggctgtgccccagtcaccctctgatatcctggcaagagctaagggaggggcataaagaggcatgctgaggacctctccaaaacagaggaagctgggaattaaaaagatgtgcctgtttgggggtgtcttctggtgtggctaggggatggagcttaggaatatttggggaacaatttacagattcctttctagacattaagaatcagatatctgagggaggggtgcaggcaagggagttttaattttgaggatgtcaattcttctgctgtgctccagaacagaatcaaatgccttcctccaaaccctaggcatgattgagagatggagtggggaggctgaggtgcagggtgagaaacatgactaggtggcctctgcagaagaaagctttggtggttgggtgatggagcagccaaggtaggggtgggggattctagggacacagaggtggggattggggcttgcaatcccctaaaaattcatcccccaaactcttccaccccagagttgggaagtatttttagtgggaggcctgtgatcattggtgacttagagaagagttttgtttgccatggctgtggccaggggctgcttagagaccctccttcccagcacagtcaaaccagagagaacctgggtggagggagggcacttagctaaaggggtgtctttctgggagctgcataaagccccttctccagttgtacctggactcagtgttggggatgtatgggatattttgggtgtctgggtgaaactttcctttgggggtgtgggatgggctgcagaggatgattgactttgttttaggggctacttcccactgcctcatctctttcttgaaaatcccggtcattgctctatgccttaggaaccagagagaatcatctgtacactctgaaagggtctggggacccgaaggacagcaggctatatctaaggaagatggctctagaactccacgtcctttcttcctccatgtcccattcccccaacaaggctctgcctcaaccccaatctacctcgtcctgagaaactctgtagggctgagagaaggcctgggggtctccttgcagtgccctgttcatttctctccctcctgtgcagctccccaccccgggtgctccagagctgcaaacgtggaagcggggagtcccgcctcccccaaaccatccaagattccattgcctccccccgcccctctccacgccctcccccagctggttttgtgcaacgaaggcaaaggggaaaaaaaaggaacagaaggggagggagccacgtcggctggccggctggccgtgggcagccaggatgagcggtgcgggtggggcagcagagggagactgcaggggctataattaaagggaaaatatagagtttccagagaggcagggctggagacagcaatggagggatggaccttcatcaattatcccgaccatgtggcagcaacttgtggcccagggtctgcccccgcctagtgccagcgactgcagggcaggactagggggctgaggtgctgagatggcagttcttgaacccaccaaagtcctgccccctactgtgggtcagttccaagagaacccctccctaataggcgacaggggtcctgtttttggagggaacagacatttagagtggtggtctagggcagggtgccgcagggcttggtagtatgagggttagtgacctgtccacttccttgcttcttgggttttcgtagtaagaagggctcctgcctgcagctccccgcccctccccatatgtttcccatccaggctttcccacgcccatcttaaagaagagttgaaacctccaaggtgtgaattgggggttgctacatcatgggcctggggttctgaaggatatttggggatccctggctttggagttttgtgtgcctggcgtgtgacagccaccaccccaatgtccagttccaggccttcctcccaggggccgaggcagacagtttccaagcatcctttacacgtggcatggagctgaggctcaaggcctcccctgccactcttcgacttaaaacgcttggcgggtgcccaggctgaagatgtgtctttaatttctgcagtatgacagtgagaggaagaatgtgcttggggtctcctcccagcctggctgggccttcctggccaggattgagggctgcagactggggggatggggggtgggaggaggagggagcttgtgcctgtgagaggaggagacgccacctcatctttaggaaactctgaagctctggcttcttgtggaatgtaagactttgtccggcacttaaagtgggggggagcaaaagccaaaatctcctccccacacccccaagaaatggtaaagtcatcagcagttagggaaaaaaaattccttaagaagaaaaacagaaagaggaaagtgctgagcttgagttctctccttctccaaatttccccaagtgcccccctccaacaccaaagaaggagggaaaaggcccccaccctcagagctcctcaggtgccccatctggactccatggtatgggacaaaggaggagaacacacctggaagaggtagcccaggtgttgtgcacctggtggggggcatgcacccctgccctgcacatcggggtcaccctttccagctgctgcagcccccagttgaggttctgttgctcttcccccaactccaattctccagaacgcttctctgctcccacctctagccctagactgatgataaagagggggttcctaggagagggtctgaggagacagaagggcggggtctaagagtgggggtgcagtgaagaccccaggatgaagctctccatgagtctctatcatggagccctgcacagttcctgttgagggagcctggagcagagtctggggatagaccccgggtgtgtgcaggcccttcttcttccctcgctttagcattgcacagtcggagccctttgctaggttcctcagcttccaggtacagctctgctcttctatgccttagccccaaacccaagtcctccagcctcctaggatttccctctctcccttcctccctccttccttcctttccagggttagggggaagatgatgaagtaggttttgtccatgctgagtgtttgaagcctgtgagacatccaattagaaatacggaggaaacccttgggcacttgggtcaggagttcagaggagagacaaatgtgggtcccaggatgatggtaactgaagctggggttgtggatggtgttgtctcagagaaagcatggagggagggagtgtggaggggctggcactgagcctcggggaccctcagggtgtaagggctgggtggaggaggaggagatagggcaagagtggccagagaaggagggctgggtgagagggattggggggtcatgagtgcagaggaaagagatggtactagaaggaaggagagttatatgctgcagagagaactagtatggtaaggagtaaaatgttccctggacttagcagaatggtggtgactgatccccgcagcgtgagctgctgtggtggagagatggacaaggaagccggactggagtgggctaaggagtgtgtgggaggccaggaagcaaggtcagagggcagcgactgggaggaggagtctggctgtggcaggagtctagagaggcatctgtcccctgctctttctctttcttcccagcccggatcctgcgttcctttcaggcccctgcatccctcctctgtcttccaagtttcttcgctgctttctccatccccctctgtctccagagctccttttctggatctcatttgcctcttttgctctccttccccctttccttttctttccaggtgacccgagccctcaaatgtccatagccaggcccagcctccccctcattctcccctagaacaagccctcattccaggctcttgaagatgaactttgttttctagtcctggacggatcccaccccattctctgaccgctgcctccaccacccccaccccagtcctaggaggagaacttgggagctggagagagaagggctgggggtatggccccaggtgacacgaggtctgtcatggccccagctcccaagccctctccagccaccccaccaggtcccagccaggccccagctgagaataatgcactggatgggggatgttgttgagttaggggaccccagttctcactgctgctctctggtagtcagaagtgaggggtcagccccatctttcctgctggagtgagctcccagctgggtagctggcagcttttctgtcatatccctccctgctcctgatgtctggaggcagtgtagttcttcttaaaagttggcttggcagggcgcggtggctcacacctgtaatcccaacattttgggaggctgaggcagtcggatcacctgaggtcgagagtttgagaccccagcctagccaacatggtgaaactccatctctactaaaaatacaaaaattagcccggcatggcggcatgggcctgtagtaccagctacttgggaggctgaggcaggagaatcacttgaacccaggaggcgggggttgcagtgaaccgagatcacaccattgcactccagcctgggcaaaaaagcgaaactctctctctcaaaaaaaaaaaaagaaagaaagaaagaaagagaaaagaaaaaaaaaagagaaagttggccccatgaattgattgaatatttacacctttctgggttggttcaattccgtgcctattttatcccatttgcttttctccattcctttcttcctttctttcttctattcatttaccttttctctcccccacccccaacctctctcccttcaaatttttctcttcatgcgtttttcttccttttcttagttttttttttcctttccttttctttcctcggtctctgacccgttgtcccacctctccacccacatacttttttccccctccctcttttcctctcttattctcttccggtatctcctcttccccagtccccggttctctggtgcccatcctggggtatggcgctctgccgggtctcctcatgctgtaggcgggcgtgcagccttcgtgagctgctccaggggagaaagggcagcagccatagggggcgtggccggggggcgggtggtgcagggctcgcatcacagccagatgtctggttgccgtgttgtgtttgggagataaatgccagggttcctttgaatcctgaatttaaataaaagaaggggggtgctgaggagaagcctctgttgggcagaggtaccttccagatcttgatctccttccttgatacccaccccccacaacccccaccccagggaagttttggccaccgatgtcttctgtcttctgcttctgccccagccacgagttcttcctcctggcaaacttgagattctggagtttcagggcggggtgttgggcaggggtcctggcaggggcccctttggacagtctggctcggacacagaaaggatcctgtatggataacatgaccttgccttcttcccaaaagccacccccaccccattttgctaaggagctacattcatttgctgataaattcatgcaacaatagtcacgtgccaggcactttgctgggtactgggcattcaatggtgagcagcacagaccctgtgtctgcctgatggagtttgtgtctggtaaagacacagacagcaatgaaatcacatgaataaacgtggaggtgcaaccattaaggttactaagaagaagaatgcagagctttgaatgggcagacatggcagagggtctgctctagtcctggagccctaggaaggcttccctgggtaggctgatgggaaaaggataggaggcagggtggatagtgatgggaccacatatgcaaaggcaggagggggcatggcgagtgctggatgcccaaggaattcagggaaggccagtgtggctggagcaccacaggcaaaggctgggcgggccagagaagccccatcacaggtgtagtttgcctcctttcagctatgggccccagcagagggcctgacgcaggggagggtcacaatcaggtctgcatttgtaaaagaaagccatgggcactccatggagtaggtacctgcgggaggagggctgtggtcaaaggtggaggagcagctgagaggctgctatacttgcccaggtgaggggcttggatccggtaggtgggaatggagacagagagaagaggatgggcttgagagccctttgggaagcaaaatttacaggtgctggggttggattggatgtggggtggggttggtgaggaacagggatgatcccgggcttctggctgggcaaggaccctgcttgggggacaatatgctgagtttggtgcctgttgccggccctgtagttgatccttttcactgagtggttacttcaggccttctggggccagccgtgtgctggggagagctctggggacaatagctcctattctgggagagtggggagccaggaagaggaataaaacacacacaaaaatgcccctcccttgaggcagcactggctgtgtgattttgagtaaatgctccatctcggaacttcatttccccagtctgtgaactggggtagtagtgagaccatcttgctggtctatgtcttgctcagtaaatggaagcctctggacacaaaggatgatgggagtgccaatgagagataaggaaggctgcacggaggaggcagctttccagccaggcttgggagggtgggtgacagggttcaaatgcagtgtttaagtgggaggaaaggcaccgcccagcctgggaagcttgacatagattgagtgagagacagacagacagaaagagagataaggccataggcagaggaagataaggctggaaaagtaggctggggccaacttctggaggcctgggattctgggggaaggagttatactcagtggtggccatagagagttggtgactgcctttgagaggagaatggttgtgatccttttgccgagaactcacccagaggacttataccttggtgacagcagaaggactcaagttagaaggccagggcccttaaagggaggggacgattcgaggaaagtataggtgggttgggaggaattcatggatatggagatgaacaaacaaatggggccgggagcaggtaaagaggtagaccagataacacctccagagttgcggtttgacctctgctggatctcggagctttagagtctctaggtggaaatatcacagaataagagacattctgctagaaggaaatttcgagtttattcctttcttccctccttttacagattagaaaactgaggcccagagaaggaaagtagctgccagaggtcacacagctaggattgagggatcagaggtaagaaccctatgacacttcaagagcccaggcggttagggctggggagctcgcagggccagggaggtcactgaggatggcggcgacagcatgacacggggatcccacataatcccagttggtcctgggaggacagcccaggagagctgctccccaactctcagctgagccatgtggccagagggggaagggagcctggtgggcagggaggaactgccacatggaaaagccttgatgggaaccatctggcctgggcgggcggaatgtgggctgcagggaggggaggagcaggagacgggaaggaggccatggtgggcgggtggatggcgggtttgggctgggagtggcctgacccggaggcccctaccttccagactgctgcagcccagatgccttcgcagccatggcctggcccatccaacccgctgacctcattcccagctcccctctcttgcaagctccccccttgcctgccacgtagactggaggcttagctgcatcttcgctggagggaggaagagcagaacacagaggccctgagcccagagctctgctgggtcagactggcctggggagagcagctgtgttcctccagcgccccccaagaccaggctgggcctcagtttgccctcctcaaacctcctcaaacctgaggcccagaaggtggaggggacagaggtcatgggagaagcatgacaatgaagtgggttggagtgggcgagaatcacgtgggggctctgaggtcattgtagccatccccctgcctcctcagggcaggagggtgctaggatcagacccagaaagggacaggggcaggacattcctcctcttttcaagcattcacaagaagcagagttccatggtggtctaggagggggtcctttgtaagatctagtcttcctccttctgctgtgtgaggaccacagtatgtggctaggacgaggtgggcggtacgctgtcttccgtctctcagctgctctcagggaccttcgcttcaatcctgtctccaggctctgcctctgacccctgcctccccctcgctttgcttccctgccccccagggtcctgggtctccagctgccccagttgaacagggggctgtcccctgcggctctcaaggcgttccggggctgtgagtcatcgggaatgtctgttctgactgcggcttccctctcctgacgtggaccctctttctcctcctcccccacactcagggagagggtgcccctcccaggcagggggctctgaagtgggggaggaagccacaggcaggcctgggatgaggtcttgctccccgattgccatcggaaggaggcttcgaagacttgcacgcccctcacccagattctaccttcccaaggcagatagaattccctgactttctcccatttcccaggtggggacactgaggagaggcggggaggggagggcctgaacttgggtgggcccaggttcacccactcccttttagggctcagctttgtcagactgggaatctgcccaagtgtccttctgaagggccctccccgcattcgaggctggatctggcagaaaagctggagaggctctgctgcccgctccagggatgacacgtctctgctgggtggggagtccacgtccgcagaaaagggggaggccacgtgtctggacccttcccgcagagcccctgtgccctgcaaggctgcctgccacccccctccttctctccctcctctccccagcagccctggcctgccccctccctctgatctcaagaaatagctggggggtcgggggaggggacactgaagggaagaccaagctaggaaaagctcctctccaccccctcccagcatgtctgggcatttcactccccaccaatgagcctcagtttcctcaactggaaaataagggggatgaacagaaaaagtctctacccatgggtgagtctatgatcctgtctctgcacagtcagatagactcaggcactcacacccactcaaacccacctgtgctctcaggcacgttcattcattcacacattcaccgatgcacacttacacacacatctacacgcacatgtggccctctgcctattttgggtacagcagatccccacaatttctgtttccctctttctgacagcccaccatttcttctctcattccaatcatacctcccccagcccccaccccaccccctttagccaccctctttacatttctctactcctggttctcctcctcttgaggtcactggcagggcagtgagatttgaacttcagagtatcagacctctgaccttgccaaagaccactctgactctgccctaaggctctttctgagttttgggtgggagggagtctgagtgaggagagagaatagagctgagaaaggctggttctttcctacccagctggggacctgcaaaagggtgcccttcacttgtctttcctgaacattatgaacattcgctttccaacaaagtctgtcccactgacatccggaggcctcctctgaagtgcgatcattttagcagcttgtcctggctgttgccccaggttgcacccttctaggaacttccgcctgagggagactggtcagagctcaggagggactgttccaggggatgagatatctgctggccaggaaaggcatgggaactgggcagcggagcacaccctccggacctggcccaacttcagaataacaacaaatgattgtgccaggctctgccgtaagtactttacacctttgtactcctccaaaagccctctgagatgggtgctccaattgtctccaatttcaaaggaggaaagagaggcacagagaagtcaagtcagttgcctgaagtcacaaagctagcaagtggctgagctggaattcaaacccaggcagcctggcttatctgttactcccagctggtccaagggacccgggatggtccaagggatgccctcccccttcatctaaagaagtggctatttgcataaacaggcttccatctgtgtgcatgcatggaaaggatcacgggatgacgtggctggaaacagaccacaggcaccaccagtagttggaaagatcagaacagagctgcctccctcccttttgctggagaactattgtgagctgaccaccacacacacgacatctcctttaatcctcacaacagctctgggacgtcagccttaatatctctattttatagctgtagagtcagaagggccgaggcgttgtgcaagatcccctttctcaagctcagaaagaacccaggtgtcctgacagccagatcaggcttctctcattgatccacacgtcccctatttccaaatctacatggcttctagacacacacagccacatacaacagaccacgcagaatgttggaaagaattacagctcttggccgggcgcggtggctcacgcctgtaatccctgcactttgggaggtcgaggtgggtggatcacctgaggtcaggagttcaagaccagcctgaccaacatgatgaaaccccgtctctactaaaaatacaaaaaaattagctgggcgtgatggcggatacctgtaatcccagctacccaggaggctgcggcagaagaatcgcttgaaaccaggaggcagaggttgcagtgagctgagatcgtaccactgcactccaatctgggcaacaacagcaaaactccatctaaaaaaaaaaaaaaattacagctctcggtagtgtttgaagaagcactttgcacctcctcattgacaatgccccaggaagggcttatgctcattctgttgtgaggggaagccccttgctggggcttcccccctggctgggaagtggtaaagctgtgaatagatcccatgtctgcctggcctggccacaaagctagtgctcctcccactctccaataccacctgccaccctcactgtcaccagcccagaagcaccccctgcacacaccatatccccagtgagcacacatgcatgtcacagacaggaaaatcacactcatgtagtacctgcacgacacaggctaagggctttttggtgtttcctgtgtgccaggccctgttgtaagttccgtgtaggcatgagctagatgcaaggccgcaacaatcctaggatgtaggttcctttcaatattcttatcctcattttacaaatgaggaaactgaggctcagagaggttaagtaatttgcccaaggtcacacagctaggaagttgcagagctgagatttgaacgcaggctttaaccactgtgctatggcccattctctaatattgattgcatgctactcattcagtcagtcatcaactattactgactgctgtgttgtgcccaactctgcacaggcccccgggacggctcttccctgccccctcctcctgacccagcctggtgtgtaccacatggtagatgggggctgtacctgctctcactctccttcttttccagagttcctcctcccccacaagctggcacatgtggatattggctctgttttgcctttgacccctagtgaaagaaaatactgaggtaacgcctgactggggagcatggacacagggagatgcaaatggggtgccagctggggccagggcaggggtgggggatagggtagggggtgaggggaggtctgggagcaggaatctctcttcgcttctgcctgcatttttatcatatactaatatctattctttttcctttttttttttttttagacggagtctcgctctgtcgcccaggttggagtgaagcggctagatctcagctcactgcaacctctgcctcccaggtttaagcaattctcctgtctcagcctccagagtagctgggactacaggcgcatgccaccatgccctactaattttttgtatttttaggagagacaggccttcaccatgttggtcaagctggtctcgaactcctgacctcaggtgacccaccggcttcagcctcccaaagtgctgggattacaggcatgagccaccgcgcccagcctcatatctatctttatcactccatttcagatcttcttccatatatggctctgtgtgtctcctgtccttccctgtctcctcactgcttttcagctggtagacccctgtggggacaacagatcagagcttggtcaccaatatggacatctaggtctgagcagggcccactccccgggggcgcatcagctccatcccggcaccctttacactggccttctcttcacaaaggaccacaggtcatcctcaagccttcctcccaggctatccttgtccctgaatactaatgtctaaaggtcagcccagctaccagcagtgtgcatgtgatgtgtcccatctccccttcggattggaggaagaagctgtgtccctcccatcagacagacggtctccttaaaggtaggcattgcgtccactcgttcagacagagagctctctgaagtcagggagtgtgtctcccataccagattggggttctttgagggtataacgtaggttttcccatcagactaggagcaggcctgtgtcacctccttcctctagattctcctggtctccagcttgggctctgctggaaagaagaggaagtatttagcaagggtgaaggtatgatgccctccccaccatccgtctctccctccaaacctgttcaaactggaactttaacattcacccccaatccagtaagctcaacttccttgagtccctcttcagtcctgtcctctctttcccagatgggttcttacttccctgaggcaaccagagataagaaaagaccagaatatgaatatccagcattccacaaagaatcctacaggcagggatattgcccaatcaccagtgcctcgcatcccagttctatccaagatccaagcttgatatcctcctgaaagacttcctgaatcaggtcaccaacatggacatctgaacttccagaatcaggtcaccgtctttcttctcatctctggatgtatttggagctcatttgtctgacggtttttgaatgctatcttttaaaaataaacttttacaatttgggtttaataattctagatttatagaaaagttgaaaagaaagtacagaaagttcccatatatcccttatccagttctcttaatgttaacctcctacatcatcatggaacatttgccaaaatgaagatgtcaacactggtgctttgctgtgaactaaactccagactttattcggatttcatgaatttttctcctaaggtcccttttccgttccggcattccacccaggatatcacattgcatttggtgtttgtgtctccttggtctcctctggttcttgagagtttctcagtctctccttgtttttcgtgactgaagtttcaaggagtactggtcaggtattccatagaatgtcctactgttagctttcagcagtaaaagcctttccacaaacaaaaccttctgcagagtcctaatctgtgaacagacaagaatggagttgccatggtcacagcagtgatgagaaatgatcccctgaatatgaatctccatgaaaccccccgagaattataagaaacccccaggataccatggaaccaagtttgaaaaccattaatttaggccaagctctgttcagtacttggttttgagctataaaaccctagacagggaattataaactagatcttagatcttacatacttctggtgacagggccaccacagtttttttgttttttgttttgttttgttttttgaggcagagtctaactctgttgcccaggctggagtgcagtggcacaatctcagctcactgcaaactccgcctcccaggctcaagcgattctcctgtctcagcctcctgagtagctgggattagaggtgtgtgccaccatacccagctaatttttgtatttttagtagagatggggtttcaccatgttggccaggctgatctcgaactcctgacctcaggtgatccacccaagtcggcctcccaaagtgctgggattacaggcgtgagccatggcgcctggctgcattggtctactcttcagatgacatcatgttaattggaccagaaaagtgccaaggagccttggtaagtgcatgcattccaggggatgggaagaaaaaaactcctacaaagatttagtgtcttactaacatcagtgagatctttagtggtttggtagtcagaagcatgactagacatcccctccaaagaaaaggagaaattcttgcccagcagataagaaagctcatctggtaggcctcctcagactctggagaaaacatattctacctttgggaatatgttttacaggtgacattaaaggctgtcaaatttgaatgagacacagagcaagaaagagctgttcaacagttccaggtgtggtgcaaatggtcctgccacttggcccttaagacccacagaccctatggcattgggggtatttgtgacatcaagaaaagctgacaccacaataggagaattacaatgcagacctctagagttctggggggttatttactagtcaaaaccagcttattgcatgctacaggaccctggtagaaacagaacacctaaccaagggacatcaggggaccagagccgcccatcatgagctgagtcctgacagatcctacatcatcccatgaatatcctccagactgagctgtccaggtttctgctcattacatgtcctgggtctctcttgatgccccttatgtgtctatcaaggtccctcccacttaacatgtcactcagccaaggatgcactcttccagctctaggtggccagagaccagggtaacaggacaattccccccacccaactacatttcatggttcagacgacagacttaatggctatagaattttcctaaagtgtggttcatggaccactgggggggtccctaaaggtatacaagtggtccataggaaacctctaaggaaaaaaaggatggaattgctctactcataaatctgaaatgcaaaattgattaattgattaagattcttgcaacaatcccatcttgtacatttatctatctatctatctatctatctatttatttcagagacaagttctcactctgtccctcaggctggagtgcagtggtgtgatcatagctcactgcagtcttgaactgggctcaaattaccctcctgcctcaacctcctgagtagctgggactacaggcgcacgccaccatgtacagctaatccttaaattttttttagagataagctctcacattgttgcccaggctggtcttgaactcttgggctcaagtaatcctcctgcctcagcttcccagagcactgagattccaggcgtgagccactgcacccagccccattttgttcttaataactgtcacattctccaacgttgtgcatcctctaatttgaatttggctgatccagcttgggcagatcatctccagagacatattttcatgtcacttatgggtttttggttattatttttgtgatgtgtaatatcctcaacccaaataataagccagtgattcaaaagtggttaattaaagcctaagaagagtgagaaaaatagtaacccaaatactacaactgagaatagtgttataaaagtaaatacgtagtgtccaagcatatggctgggctaaaaaaaaaaaaaaggaagaaagaagaaaagtaaatacatagtgaacaagcatctagttcaaaaatatgtaaatctctgagaactgggacacatctgacaatttcacacaagtagctgaaaaagtgtaaatagtgagtatgatgttgaagatctgaacttaactttactggactggtgatctattccattttaatccccagtgagttgtgtgttatgaaactttgtcaaatagtggcataaagccatcaagattttcacatcattttcaaacacagcacagtgacctttctggtaaaccatcagagacttttcttttttttccagaacaagagcaaaataagctttccaggacaaaattaatggattttcccccagtaaaggcaggaagaaaaacaaaatgacagaggcagcatttaaaagtgcactcctcttagtaaaacacagctacaaagtaatactatctgagaagattgtaacacagccgtgttattaatgatacacatttctctcacagagaatgaaaaaccaacttttggcaaatttcctttatcaaatgacagtgttggatatcacgtggtgtcaattgcaaatattatgagaaaatagtttgattttaataaatccggctatcttatactcctcattgaaaaatgtaagtttttgcccagtgatagtttgtgtaataccaaaattttaaaaaagataatgacattttattcctctaaggtgaggtttgaactgtcagttattacatatattgtcatctgagcaagctgtttaagatcttagaactgatcttcagtggcctagtcaatgacttaaggaaatggtttcatttcatctttttcaaacattcttgtggccccatgtgaagctggctaaaaatcaatgatgtgctgctgggtctggtgactcatgcctgaaattccagcatttgggaggccaaagcgggtaaattgtttgagtccaggagttcaagaccagtcagggcaacatggcaaaaccttgtctcacaaaaagtacaaacaaaatcatccagacatggtggtgcatgcctgtggttccagctactggggtggggtggtgaggagctgaggtgggaggatcacttgagcctgggaggcagaggctgcagtgagctgagatcatgccactgctctccagtctgggcaacagagtgagactctttctcaaacaaaacaaaacaaaaccaaaaccccccccatttctccactcaaggccacttctgagatcctgagtgacttgctcaaatggcaatatattcaatatctgtattgtccagacatcaccaattacaatatttactgttgaggagcaagttagcagaatttcttaaaaccaaacagcagtatgactgctccatttttattttgattctttttcagcacttggtgattttgtttctgagcaggagaaaggaatcggtgacatattattaagactatttaaaaaccacatccaaacattactcagaacttaaagaattctttccggagtcaaattcaaccaaagaaaggattatgactctgcttgctcccccccaccgccgcccccctctccctgggtgaaatacttagtcttctggcttttgaaagctttgtacctgttgacctaatgtccgagagaggggagagcagtctttaggaagaaagaggtctgtgatttctgaattcttgtttggtctgaatccagaaccatctgtcagagccaccaaacatttgctgccatttctaatgacctataattgtggtttaggatttttctaatttggtacgaataaggaataagaaaagaaactgacaggatatgaaaactccttatggctcctactgtcacacagggcgcagacgtactggcggaaattttcagaaggtatcatcaccctccctgatatgtaacaattatccttcatgttacttttacacagttgcatttcaaaaatgattttagaaatacactgttgttttaaaacttgtttaaagtgggtggttgatgtatgagctcaatgcccagtaagggctgctgatgttgagtgtgagaacactcccgttgctgccgaggctgcattccatggcagataaagaaatcccatagggaatccagggaggcccctaggatcctgtgagccctgcttgtccagcgcagccctgctgtgttagctgagctgacccttgtcacagccttctggtgggtcactagctcttgctcaaacaaaagcaatgctctgctccatgtccaacagctctgtcccagctgttctgctcaaagtccagtgaggaaaatgctagtatccccattttatagacgagaacccagaagctcagagagcttctccccaaagccacccagcttggaggggagaggctaggagaggacccagaaactttttatgctccttgccccaaagactctttcccccagacttggatgtctgcaaaaagacctaaaggacagtgtccagaatgctcgggtttacttaggactcaggtccagacgcctgcttacattgtctcaatctttacaacggtcttcacaatgagatacatgggtcattagctctgctttacagatgaggaaaccgaggttcagagaggttaagtcacttgcccttggtcgcattgcaaatgaatggcgacttctgcttcaaactgaggtctggcagctaagtgtgggcttttaactctccgctgcaaaatggccatcaaatggggttctcccttaatatctctccacctgtggattctccccgagcgccgtctccttcctcctgccttgcagtctctgcaaactcctgccacagcctcccagctcctctccctgcccctccctcctagggcccaagtctttctccgaaaggcagcagccagagtggtcttgccaccaggtgcctcatccttcctccccgctctgcctcctgcgccgtggtcccctcccactggggaggacccgagctccccagtcacccccaggccctgccgctcaggactagctaacgtgctctcactgccttccggccttccagccacctccgtcccccagcgctcccctcctgagccccgaggccccgggcatcctgcccagcgcagaccctgccctgctctgcttggaacaggcccctctccacctaccatcccaccccccgctctcccctaggcgtttctggctacacttctcttcaaaaactcccttgggtccctggccgtcccgctctgctgcagggtctctcccagcgccccgctctgcctggctgcccactcccatcccaccctcctgaggatcctctctgggaggactggggtacaactgtcaggttcatcctggctcctagcacagtgcctggcgcacagaaggagcagtgcagtcgcgctatgagagcttggcctgcgggctcagacttccagttcaaatcccagccgctccttctcccagcggtgtgactgtggacaagttacttcccttttccgtgcctgagtttcctcatctctaaaatggggatcatagatcttgttcataagattgtgagaacctaaagtaggtagaacagtgcctggtggaagtaagcatgtagcatgtattagatcaattatcattcctcaagtaaagttgttagtttactttccttttcagcccacttccctctcctgagggcctcatgagcctctgaaagtctggctccacccctccccgctcactcgagggaggtttcaaaacccaaggggtggattctgtcttccaccacatcccccataccagagaagctgtgccatctcctagctctagctcagaaattctaaaactcaagagagttctggaaagagctgtggacttggagagaaaagccctatctcctggtcctggttctgcccgccacatagctgtgtgactttggacaggttgctttacgtctctgagccttaatttttactcttgtgaaatgggaataatcccagcctcacctcccccatagggttgtcccagtgcttgattgcataatctggagacagggtattttgtcaaccaaggcagggtgaagaaatgcagggcctagtaaccacagggttggaagggaagaccagggccaagcctgcaggtgtctctggtcagggatgtgccaagggtgtggccactgggctccgggctgggtagcaaactgttaggtggcgccgattgggaataagcctgggcccaagctttgtccaaagtcactcaaagacttctgcttggtcactgtctccctgccacccgctcttgccacttcttcaaaagcaccttcaagtgcttctcaggcccgcagaacgcccactggatcctgatgcccagaggccctgccaagtctgactgccagccacagctctccccacccctttcccactctcaactccagcccagctgaattaggaatttcctaatattagtcatgattttttcagttgcaagtgccaacagcctaattcaaagtggcttaaacagaaaattaaagctatttggcttatttaaccaaaaaggtaggtacaattggatctatcggctaaaataagatcaagaagactcagtttctctacctcttcttttgcttttctctgaaatagcttttcttcttggacagcttggctctgtgcggtggtctcacccagctgcctcaggcttattttctaaaagctaagcaaccccaggagaaaaacagaaactctttcacaatagtttcaagagggaaaaaaaaaaatcccaagatttgccaggcacggtggctcatgcctgtaatcccagcactttgggaggctaaggtgggcagatcaccttacgtcaggagttcgaaatcagcctggccaacatggcgaaaccctgtctctactaaatatataaaaattagccgggggtggtggcaggtgcctgtaatcccagctactcgggaggctaaggcaggagaattgcttgaacccaggacatggatgttgcagtgagccgagactgcaccactgcattccagcctgggtgacagagagtctgtcaaaaaaaaaaaaaaaaaaaatctcaagatttgcccgtattggatggacttaagtcatgtgcccgtctctaaaccagtgaccatggctggcggatgaaatatgctggttgacttgggcatgtgcctacaccagcaaggcattgaccaagagtgggggaagggcagttccccaaaataaaatctggatgctgtttctggaagaaggagaaacaaatgctaaggcaggtagaaacactcaatgtccaaaacattcccccttggctgctagcatatatacacacacgtacttttcccatacacataatttttataagctttttgttaccatttttttctttttatttggaaataatttcaagtttatagaaaggttccaagaatagtgcgaagcagttttgtttcctgaagcatttgatggtaaattgccgacacgatattccatcacccatgaatattcttatgtgtaaatcctacaataatgttcacctaaacaaccacaatgcaaccataaaaatataaacactttactacaatttatttatgttgtgccatttgtcccaaatatcctttgtcacaaaaagacccaatccagtatcatacagtgcatttatcttcagtctttccttgctgttcatgaccttgtaaattttgaggatcacaggtcatgattttgtagagtgtctcttggtttgggtttgtctgatgtttcctaatgattagattcaagttatgaacttgaggtaggaatatcacagaagtgatgccatgttcttctcactgcatcttatcgggtggtgcatgatttcaatttgccccattactgatgatgttaacttcgattgcttgattaaggtggcatctacaaggtctatccactgtaaagttactcttttcccattgttttctgtggggaggatctcaaactatatcaagtcccattccttatccaatctgtacccattagtttaatttaattttttttttaagacagagtctcactctgttgcccaggctgaagtgcagtggcatgatcttggctcactacaatctccacctccggggtccaagcggttctcctgcctcagcctcccaagtaaagtagctgagattacaggcacatgccaccacgcccagctaatttttgtatttttagtagagatgaggtttcaccatgttggccaggctggtctcaaactcctgacttcaagtgatctgcccaccttggcctcctaaagtgctgggattacaggcatgagccaccacacccagcctgcacccattaatcttagaatccattgagggcttttgcctgaaatatttttttaaattatatttgttgctgtcttagtttgaactgctgcaacaaagtaccacagactgggtgggcttataaataatagacatttacttctcattgttctggaggtcatggcgccagcacagtcaggttctggtgaaggcctttttccaggttgcagatggctaacttcttgttgcatcttcacatagcagaaagagagcttgagagctatctggggtctctttcataaggcactaatcccattaatgagagctccaccctcatgacctaatgtattagtccattttctcactgttaataaagacatatgcaagactgggtaatttataaagaagaagagttttaatggactcacagtttcacatggctggggaggcctcacagtcacagaggaaggtgaaggaggtgcaaggcacgtcttacatggcagcaggcaagtcagcatatgcaggggaactttacctttataaaaccaccagatctcatgagatatgttcactatcatgagaatagcatggggaaaaacctgcccccatgattcagttacttcctactgggtccctcccacaacacgtggggattatgagaactacacttcaagatgagatttgggtggggatacagccaaaccatatcattctgcccccgccccctcccaaatatcatgtcctcacatttcaaaacacaatcatgcctttccaacagtcccccaaagtcttaactcatttcagcattaacccaaaagtccaagtccaaagtctcatctgagacaaggcaagtcccttccgcctatgagcctgtaaaatcagaagcaagttagttgcttcctagatacaatggagatgcaggcattgggtaaatacacccattccaaaggggagaaattggccaaaacaaaggggatacaggccccatccaagtctgaaatataatagggcaatcattaaaccttaaagttacaaaattatctcctttgactccatgtctaacatccagcgcttgctgatgcaaggggtgggctcccatggccttgggccactccacccctgtagctttgcagggtacagctacccttccatctgccttcatgggctggcattgagtgcctgcagcttttccaggtgcatggcgcaagctgtcagtggatctaccattctggggtctggaggttggtggccctcttctcacagctccactaggcagtgtcccagtggtgactctgggtgtggtctccaaccccacattttccttctgcactgccctagcagaggttctccatgaggactttgcctctgcagcaaacttttgcctggacatccaggcatttccatacatcctctgaaatctaggcagagattccaaaacatcaattctcgacttctgtgcacctgcaggaaaaacaccatgtggaagctgccaaagcttggggcttgcaccctctgaagccacagctataccttggtcccttttaggcacagctggagcagctgagacacagggcaccaagtccctaggccgcacacagcaggacatcctgggcccaacaaaaccattttttcctcctcagcctccaggcctgtgatgggagaggctgccacaaaagtctctgacatgccctggaaacattttccccattgtcttggtgattaacattcagctccttcttacttatgcaaatttctggaggaggctcgaatttcccccagaaaatgggtttttattttccattgcttcatcaggctgcaaactttccaaacttgtaagctctgcttcctcttcaatggtttgccatttagtaatttcttccaccagattccctaaatcatctctctcaagttcaaagttccacagatctctagggtaggggcaaaatgctgccagtctctttgctaaaacataacaagagttggccaggtgtggtggctcatgcctgtaatcccagcactttgggaggccaaggcaggcagatcatgaggtcaggagattgacaccatcctggctaacatggtgaaaccctgtctctactaaaaatacaaaaaaattagccaggcatggtggtgggcgcctgtagtcccagctactcgggaggctgaggcaggagaatggcatgaacccggaaggcagagcttgcagtgagccgagatcatgccactgcactccagcctgggtgacagaacgaaactccgtctcaaaaataaataaataaataaaataacaagagtcacctttgctccagttcccaacaagttccttatctccatctgagaccacctcagcctggactttattgtccatatcactatcagcattttggtcaaagctatttcacaattccctagtgctgcccacaaagaaggcttcaaagtagtgacattccaatggtaatgagcacctaacacctacattttggtttctaggtatcattttccactaaaaggaaccagaactctttggagaaatggttggtttcaaggctggggcagggaatgtacaaaatgacatcttatatattgcctcggacatcttgtgacagaaagtaaggaactgctcagagaatgatggtgactatttaaatcatcttgagctgccataataaaacaccacagatgggaggctaacataagtcatttattttctcacagttctggaggctagaagtccaaggtcaaggcattgagagggttgggttctctgaggcctctctccttggcttgcagatggtggccttcttactgtgtctgcacatggcctgtctctgtgcttacatcctcctggtgtttctttctcttcttataaggacactagtcctattggattgaggtcatacacttatggcctcttttaaccttaattacctctttaaaggctatatctccaaatatagtcatattggcgattaatccttcaacataggaatgctagggggaggggacataattcactctatagcagggatgaatcaaaaagacacagaagccagcttgaagaggtctcactggctgcatctgaacaacttgagcattaaaataataaccttaatactgacagaaagaaagagagaaagaaagaaaagaaaagaaagaaggaaggaaggagaagaaaaggaaagaaagaaagaaaaagaaagaaaggaagtaaggaaagaaggaaggaaggaaggaaagagaaagctttttcagtaagtagaatgacagaaggaatgatggaattagataattatcatttgggaccaggcgcagtggctcatgcctgtaatcccagcactttgggaggctgaggtgggtgtatcacctgaggtcaaaagctaccagcctggccaacatggtgaaaacccgtgtctactaaaaacacaaaaattggccaggcgtggtggtgggcacctatagtctcagccacttgggaggctgaagcaggagaatcgcttgaacctgggaggcagaggttgcagtaagccacgattgcaccattgcactccagcctgggcaacagagtgagattctgtcaaaaaaaaaaaaaaaaagataataatcattttgcatctgtcatggactgaatattagtggccccctaatatctatctgttgaaataccaactcccaaagtgatagtattaggaggtgggatatttaggaagttattagctgatatggtttggctgtgtccccacccaaatctcatcttgaattgtagctcccataatccccacatgtcatggaagggacccagtgggaggtaattgaatcttggggcaggtttttcctgtgctgttctcatgatagtgaataaatctcacaagatctgattttttttataaagggcagttcccctgcatacaccctcttgcctgccaccatgtaagatgtgccttcgttcctccttcttcttccaccatgattatgatgcctccccagccatgtggactcttggacttacaccagtggttggcagggactcttatgccttcagccacagactgaaggctgcattgtcggcttctctactttcaagattttgggacttggactggcttccttgctcctcggcttgcagacaacctattgtgggacttcactttatgaccgtgtgagtcaatttgccttaataaactccctttcatatatacatctatcctattagtcctgtccctctagagaaccctgactaatacaggaatacacaatcctacacatattcgcagctacatttctttatttacctgtatatattgaaaactatggattcctacagatgcctccaattccagtccaacaccacagggttcattctagttttctctctttccctatttgtaatgtccttctccaacaatgagaaacctggcttctattatccttaacatatacagttatttgataaatccccctctttgtaaccactctttaccactctccatctctgctgccacttccttttcaggtggatgccctccttactcttcttaggctctggtacccccaatgtgcccaccccaacccctacatgtagaatcgtttttttttttttttaatgagactgagtctcactctgtcacccaggctggagtgcagtggcatgatttcggctcactgcaacctctgcctcccaggttcaagtgattcttgtgcctcagcctcctgagtagctgggattacaggcgcgtgccaccacccccagctaatttttgtatttttcgtagagacaagcttttgccacaatagccaggctggttttgaactcctggcctcaagagattcacctgccttggcctcccacagtgctgggattgctggcgtgagccaccgtgcctggcctagaatccttcttacctctactttggttctgatttcccatgccaggccatccccatgtagggatgctctcctcaactactaggatctgataaactgtacgggaccattccaacgcatggatgccctcaccccagtcaagctaactgatcataccagccatcccctccccctccctcattgccctactctggctctgatatcttgttctgggacactgtggctcccactctcatcaccatgggtgccaacctcgctctggcctacctgatgacttcagggctgaactgttccagtaaggaaaataggaaagagtatgcaaaggaaggaaagagaagggaaggaaagagggaaggggaaaaagaggggaagaacaattttttacatgcatatatatatttacttactgtgaagtgtacgaatcttaagtgcatattaagtgcatacctcaacaaacctttacaaagtgaacaatccatgtgacagccaaccagatgaagatatggaacattacccacacctcagacgtctccctcataccccatccggttattgccctcttctagataaccagcttctatccctatggaacagtttggcttatttttaattttatatacatggaaacatatagtatattcttctgtttgggactagcttcatggtatttgtgagatctgtccatgctgttgcacgtggcagtagcttgccctttgcctttgcctcctattccatggaatgaatataccacaacttctgtatgcccattctattgctgatggcccatttgactcttcaagtttttgttttgtttgtttgttttttgagagacagggtcttgctctgtggccaagactggagtgcagtggtgcaatcatatctcaatgcagcctcaaccttccagcctcaaatgatcctcgcacctcagcctcctgagtagaagagaccacaggtgcatgccaccacacctggctaatttttttttttttttggtagaaacaggagtctcactgtgtggcccaggctggtctcaaactcctggctcaagtgaccctcccaccttaacctctcaaagtgttgggattacaggcataagccaccgtgcctggccctcttcaagttttttttgcttgtttgttttgttttttttaccattagaagtaacgtggttacaaacttgcacatgcccctttaatgcatatataggtgcacttctatttggcatatacttgaaagtgaaattgctgggttgtagagaatgtatatgttcagctttagtagttattgccagagttttttctaaagtggttgcagaaatttacactcctcccatccgtatgagagtcccagtggccacatccttattagtagcattgtctgtcttttaatttgtagccattctagtgaatatgtagtagtatctcattgtggtattaatttgcattttctgataaatatgttgaatacgttttcatatgtttattagccaattagatatcttattttatgaaaagtatattgaatcatttgcccattttctgaaaaaaattggattgtcaaactttttttattttataagatattttaaataagttctggacacaagtcctttgctaaatacatatattgaaaatatctgcaggacatggtggctcatgcctgtaatcccagtgctttgggaggccgaagtgggcaaattgcttgagtccaggagttcaagaccagcctgggcaacatggcaaaaccctgtctctactaaaaataaaaaaaaattatctgggtatggtggtgcgtgcctgtggttccagctactcaggaggaggctgaggtgggaggatcacctgagcccagaaagttgaggctgcagtgagccatatactccagcctgggcaacagagcgagaccttgtttcaaaaagaaggaagggagggaggaagggagggagggagggaggaagggagggagggaggaaggaaggagggagggagggagggagggaaggaaggaaggaaggaaggaagggaggaaggaaggaaatatctttctgtggcttgccttttcactcagtgatgtcttttgatgaacagacgtccttaattttactgaaatccaatttattaatgttttccttgtggttagttgtgtgtgtatgtgggtcttgtttaagaattttgtgtctaataccaagatcatgaacatattctcctttgttagtctctgtattctaaaatgttcttttttcttttgcaattcacaattactctttaaaaatgtacttctaatttttaccaaaagtatatgtgtgcataatttaatttagatgccaggaatctatggggcaggttaaaaaagggcagtagtcccgtcctccttcatactatctccttctccccagcgccagtgatcttcaatgcgatcagctattttttatatagatattctctgtatctcgaaataacttgctttcattatgacttcttgatatttcaatttgggaaatcatcttttgacttcccagtatggaagatgaggatttagttctctctcaatctctctctctctcttttttttaagacagagtcttgctctgtcgcccaggctggagtgcagtggcacaatccagactcactgcaacctctgcctcctgagttcaaacgattctcatgtctcagcctcccaagtagctgggattacaggcaaatgccaccatccccagctaatttttgtatttttagtagagacagagtttcaccatattggccgggctgggctcgaactcccggcctcaagtgatctgcctgcctcagcctcccgaagtgctgggattacaggtgtgagccactgtgcctggctgatttacttctctttgactcctaacctttaccacattcagtcacacttccagtcgtaccagcctccgaatgtggttgcatgataattttggttagccaatattcagtgtgtaccttactataactacataatcgtcattcttatctgagctgtgtcgtgtgctatgatcacttctgctctttgttctcctggagttcatacttttcttgtgttgttggtgatgttcatttagttttccgtgtaattaccaccatttcaatcccagtggtccaaatcgcccgttaggatgttcagacacatcaagaattctgttcggttccttttcttgaagcaatctcttctgaaggctttctatccatcctaatccaactggttgctctccagcccaggtgaacagccctcaagctgtaatctcctgaaccatccttccaagactggattcccccttttcataaagcccatgtcttcctcttccgtgttttattctcttgttttttcaggagctcatcctccaatagatttgtgagaaggtgtacatctgaaaatgtctttaatctacccttacatttgaatgataattttactgggtatacaattttaggtgacaaataactttttttttttttttccagaatttgggaagtctgtttctattgttcttcacattttgattaatgacctacctagaactaacttttctttgtggtctaaagtagtggtcaaagttcattttttcccacatgaatattaaatgtatgcagtatcatttgttgaaaaggtcattctttccttatgtcatttcactggatcatatagctgtgggcctgtttctgaactctttgttgtgtcccattggtctatttgtctgtaagttttgccaataccaactgtttgcactactagagttttgtaataagtctcactaacaggtagtttaagcccttcatttttgtacttatttatgatgattagttttggccttttgcatttccctatacattttagaatcagcttgtcgatttccaccaaaatgtaatcccagcactttgggaggacgaggcaggtggatcacttaaggtcaggagttggataccagcctggccaatatgatgaaaccccatctctactaaaaatacaataactagctgggcgtggtggtgggtgcctgtaatcccagctacatgggaggctgaggtgggagaatcgcttgaacctggcaggcggaggttgcagtgagccaagattttgccactgcactccaacctgggtgacagagggagactccatctcaaaaaaaataataaataaaaataaaaataaaaaagaaaagaaaagaaaaagaaaataaccttcaaggattaaaaatgtttttataaaatagatttattgagatgtaattcacataccacatgattcacccatgtaaataagtgtataattcaatagatttttaacatatttacagagttgtacagctgtcaccacaatcaattttacaatattttcatcaccctctaagaaaacctccatgcccatcaacagtcattcccttttctctcccactctacccccaaccatagacaatcactaattctatttttctgtctttatagataagcctgttctggatatttcatataaatggaatcataaacatgtggtcttttgtgagtagcttctttcatgtggcataatgtttgcaaagttgatctatgttgtagcccctgtcagtacttcaatcttgttcacagttgagtaatatttcattccacggatataccacatttctttacctattcatctgttttttccacatttgggctattacgcataatgccactttgaacattcatgcacaaatttttgtatggacatatgttttcattgaatatatacctaggattagaattgttgggccacaggtaaccttatgtttatcctttggagaaaatataaaactgttttccaaagaagttacaccattttacattcctaccagcagtaaatgaggttatattaggttgtattgaatctgtaggtcaattgaggtgagaattgaccacgttataacatgacactagcaatctatgaatacagcgtatctctatgtattttttaaaaggtctttgtcccttcattaatattctatagttttctgtatcaaatcatgagcataggccaggtgtggtgggtcatgcttgtaatcccagcactttggaaggccaaggctgagaggattgcttgagctcaggaatctgagatcagcttgggcaacatggtgagatctcatctccagtaaaaacaaacaaacaaaaattatgagaatattttgtcagatttattcctaggtgtttgggatttgatttttttcattgacttttttttcattctctaattgctattgcccacttttggaaagttttcaacgtcaaccttgtttccaggaaccttgctaaatttaataacttacagcatatctgtagttctagggttttgtttgtttgtttgtttgtttgttttttgagacaaagtcttgctttgttgtccaggctggagtgcagtggtgcaatcatggctcactgcagcctcaacctcctgggtccaagtgatcctcccatctcagcctcccaagtagctaggatcacaggcatgcaccaccacacttggctaattttttaattttttgtagtctccctatgttgcccaggctggtctaaaattcctggctgcaagtgattctcctgccttggcctctcaaagcactgagatttcaggcatgagtcactgggcttggcacatatctgtagttttaaaaaatgttctacctacataatcatgtcatcaatgaagagccacagttttatttttttcttttcaaaccttacactttttatttctttttcttgccttattgcactggctaggactccaatacaatattgaacagaaatggtggtggtgggcatcctcaatttgttccactctcaaagggatgattttcaatacttcatgccataaaatgtaaagtttgctgtgtttttaaaattcactatcagattaagaaaatttccttttatgcttaacttgctaagaattcttatcatgaataaatgttgaattgttatcaattgctttttaaacatctactgaaatatgattttgttcctttatacttttaatgctgtgatttatataactggttttcaaatgtgaagccaaccttacatttctggaatgaattaaaatttgtcatgatgcattatcattttttatttagtactaaatttgatttgctattatttttgtttaggattttatgtctgtgttttgaaataaattgttctgtaattatcatttggtgtaatgtcctagttcggttttaatatcaaggttatgctgccctcatccaaaaagttaggaagtgttctttctattctctgaaggagtttgtgttaaactggtattatttctttatttaatgttcggaagaattaagcagctaagccatctggaagtgttttttgtaggaaaatgtttaatttctgatacaatttttctaatagatgtaggactatacatggtgttccataagatttgttgtgtttttcaaaaattttgagcattttatccaaaatttctaatttattagtgcagagtcattatagtatcataatatctcaattgcctgtaggatgtgcagtggatggattcacagcaaaactgagcagaagggttcttctgcccctcctggtgctgcttgtgtgcttgttcagtgaggacctggtacctcttttgtgaagcagcatctgaggacactctggcgctcgccatggcccatgaaaagcccgaggaaggagtaaagactgagagcaatgattatattgatttgaaggtggtggggcaggatggttctgtggtgcagtttaagattaagaggcatacaccactcagtaaactaataaaagcctattgtgaatgacagggattgtcaatgaggcaaatcagattccaatttgacgggcaaccactcaatgaaacagagacagctgcacagttggaaatggaggctgaagatacagttgatgtgttccaacagcagatgggaggtgtctactgagaagggaaactgcttttttttttttttttttttttttttccctgagacagagttttgctcttattgcccaggctagagtgtgcagtggcacaatcttggctcactgcaacctctgccttccggtttcaagcaattctcctgcctcagcctcccaagtcactgggattacgggcgctcgccaccacgcccagctaattcttttgtatttttagtagagatggggtttcaccatgttggtcaggctggtctcgacctgctgacatcgtgatctactggcctcggcctcccaaagtgctgggattgcaggcgtgagccaccgtgcccggcccgaacctgcttctttaccacagaactcaattctttaaagaccaagattacgagattacattctcaattagaaaactgcaatttggttccacccaatcctgactattacaatatagttttctctattatttgatttcccccttcccaatttctttattgtacataaagtaactgatatatgtgcacaagcatagtgcatttttttaaactaaacagccaatggtatgttttgattggcatcaagtggagacgggatggggaaaaatactgattctgtgaaaataccccctttctccattagcgtcatgttcattcagctcctatctttatattccagtaagttattttgctctcactgttttaacaacaacaacaaaacataaaaatccttgcatacctgttcagttggagaattttaatgtttttcatttatcattgtaaaaccaaggacaattttataacttttttgtacatagctgttacaggtagggtaatctgtctttaagtagggagaaattgctctaaaaaaaaaaaaaagaatcctagatagttttcccttcaagtcaagcatcttgttgtttaaataaacttcttgttttttaaaaaaaaactgagcagaaggcacagagattttccataaaccccttgtccccatatagtctctgctactatcaaaatagtacatttgggcggggagcagtggctcacacttgtaatcccagaactttgggaggccgaggtgcgtggatcacctgaggtcaggagttcaagaccagcctggccaatgtggtgaaaccctgtctctaataataatacaaaaattagctgtgcgtggtggtgtgtgcctataatcccagctacttgggaggctgaggcaggagaatcacttgaacccaggagacagaggttgcagtgagccgagatcatgccattgcactccagcctgggcaacaagagcaaaactctgtcttaagaaaaaaaaaaaaagtacatttgttgcaatagatgaactcatattgatacattattatcacccaaagaccatagtttatattagggttcactcttggtgttaagtattctgagtttggacaaatgtatatgatatatatccaccactgtagcatcatacagaatagtgtcactgccctaaaaatcctctgtgctctgcctgttcatccttatctctccccacccctggcaaccactgatcttttactaggttttgccttttccagaatgccatgtagttggaatcacacagtaggtagcttttccagattggcttctttcagctagtaatatgcatttaagtttccttcatgtcttttcaccgcctgatagctcatctctctttagcactgaataacattccattgtatgaatgcactgcagcttatttatccattcacctacagaaaaacatcttgattgcttccacgtttcagcaatcacaaataaagctgctataaacattcatctgcaggttttttgtgtagcataagtgatcaactcatttggatgaatatcaagggacaaaattgctagatcgtatgataagaatgtgttcagttttgtaagaaactgccaaactgtctttcaaagtagctgtgccattttgcgttcccatcagcaacaaatgaaagttcctgttccatatccttgccaacatttggtgttgtgagtgttctggattttggccatcctaatatgtatgcagtggtatctcattgttgttttaatttgtaattccctaattacatatgatgttaagcatcttttcttatatataattgccatctgtatgtcttctttggtgaagtgtctgtttagatcttttgcccattttttaattggattgtttgttttcttatggttgtgttttaagagttctttgtacattttggaagagttgtttatcaaatatgtcttttgcaaaaaaagacaatccccatctgtggattgtcttctcattctcttaacagtgtcttttgcagagcagaagtttttcattttatttaagttcagcttatcaatcttttcttccatgaatcaagcctttggtgttttatctaaaaagtaatctcaagatcatctaggctttctcctgtgttatcttctgtaaattgaagatacataattttgcattttattttttcttcacttttgaagaataatttcacaggtcccagaattctaggtagatggtttttctctcacaacactttttaaatacaatcatgcatcacttagcaacagggatacatttgaagaaatgcatcatcgggtgatttcattgttgtgcaaacatcatagagggaacttacacagagctagataacagagcctactatacacctaggctgtgtgagatagcctgttgctcctaggctatgaacccgtacagcacgttactgtactgaatgctgtaagtgactgtaacacaatggcaagtgtctgtgtatctaaacatatctcaatgtagaatagctgcagtgaaggtatggtgtaataatcttatgggaccaccgtacgattgtatgtggtccatcattgatcgaaatgtctttatgcggtgcatgattctattttactccactctgttcttgcttacgtggtttttgaggagatgccagatgtaattgttatctttgctcctctatgaggaagttggttttttcctctggtttctttcaagattttgtatttatctttgattttctgcagcttgcataggatatgcttagactttttttttttttttttttttttttgcttttatcctgcctcgtgttctcaaattcttcctggatctgtagtttggtgcctgactttaatttgggaaattctcagtcattatggcttcaaatatttattctattcctttattgcttctccttctggtattcccattatgtgtatgttacaccctttgcaattgtcccacagttcttggatattctattctgggctttgtgtgtgcatgtgtggtgcatgtatgtgtgtgttttcagtcttcagaaagaagactgttttctcttctgttttgggaggtttctattgacatattctcaagctcagagattctctcctcagctgtgttcagcctactgatgagcccatcaaaggcattcaccttttctgttatggtgtttttgatccctaatatttccttctggttctttcttagaattcccatctctctgtctacattgtccatctggccttgcatgctgtacgctttatccattagcacccttagcatatatatatttttgagaccagagtctagctctgtcacccaggctggagtgcagtggcacaatctcggctcattgcaacctccgcctcccaggttcaagtgattctcctggctcagcctcccaagtagctgggattacaggtacccgccaccacgcccagctaatttttgtatttttagtagagacaggggtttcactgtgttgggcaggctggtctcaaactcctgacctcaggtgatctgcctgcctctgcctcccaaagtgctgggattacaagcgtgagctactgtgcccgccccccccttagcatattaatcatagttatttttaaattcctggcctgatgattctaacatccctgccatatttgagtctggctctcatgcttgctctgtcccttcaaactatgttctattatccttcagtatgcatgtctcgtaatttttttttttttggatagcaagacatgattgatgtgctgagcaaaataaactgcagtttctttagtaatgtagtggtaaagtgtgggagaggggaagtgctctctaaccgatgattatctcaatcttttaaagagcctgtgaaattgtaggctctgaaaaaaaaacaaaccccaatagtttaggctctggtaaaatagttcctcttgagggcaggccttgtgaagctgaacagaatgctctggcatatttcacatgagaacctggttaacctcctggaggtaagtaaaacttacaaaagtgtgtgtgtgttggggggtccctcctgtaactaggttctctctggaatttttttttcctttgagatggagtctcgctctgtcgcccaggctggagtgcagtggtgcaatcttggttcactgcaacctctgcctcctgggttcaagtgattctcctgcctcagcctcctgagtagctaggattacagacatgtcccactatgcccggctaatttttgtatttttttttagtagaaatggggtttcaccatgttggccaggctggtctcgaactcctggcctcaggtgatccgcccagctcagcctcccaatctgctgggattacaggcttgagccaccgcacctggcctccccctggaatttttaactctcagacttgttcacattgagcctccaacaattcatcaattacagttcaggtctggttcccggggggatttttgctgatgtgtttcttctcctctggtaaattgtgattctccatctccacctgtctatttctccagttttgagtacagcagctttccctgtgatgaatccaagaggaagttgttgatttttcagttggttcagctttttacttgttggcagagtgacaacttacttccaagcttcttacatgtcagaatggaatcttcttctcctccttctccttcttggcagagtctcactatgttgtccaagctggcctcaaactcttgggctcaagcagttctactgcctcagcctcctaagtagctagaactacaggtgcatggcaccatgcccagcctcttcatcttttagagaatattttcacttgtctagtttgccagttattttatagcatttcaaatatataattttttttttgattccgaatctcactctatcacccaggctggagtgcggtggtgtgatcttggctcactgcaacctccacctcctgggttcaagcaattctcgtgcctcagcctctcaagtaggtgagattacaggcgcctgccactatgcctggctaatttttgtatttttagcagagacgaaatttcaccatgttggccaggctggtctcaaactcctggccttatgtgatcatcccaccttggcctcccaaagtctgggattacaggcataagccatcgtgcctggccttcaaatacatcatataattgtctcctggtttccatcatttctctgaaattattaggtgccaatcttacgtattaaagatagcataaagttgagtcttgttctttgttttattttatccagtttgataattcggtcttagaatatttagataatttacttttgatgtaattgtcaacatcattgggcttaaatctaccatcttgctattttctattagccccatatatactttacttctttttcctatttttctgccttcttttgaattaattgaatattttaaaatatttattttatctctactaatgtctaattacctatactgctttaaaatttgttagtatttgttctaaggcagtggtaagcatatgccccatggcctgttttttatggtccatgagctatgaatgttgggttttttttagttataaactttatttttagaacagttttagacatgcagaaaatcatgaacatagtacagcatttttatacatcttgtatccagttttctttattattagcatagtatattagttacaattaatggatcaataatgatacattattattaactaaagttcatactctaatcatattttcttagtattttgtttgtttgttttttgagatgggatctcactctgtcacccaggctgaagtgcagtggcatgatctcagcttatttgcaaactctgccttccgggttcaaatgattctcctgcctcagtctcccaagtagctgagattacaggtgcctgccacagtgcctggctaatttttgtatttttagtagagatggtgtttcaccatgttggtcaggatggtctcaaactcctgacctcaagtgatctacccgcctcagcctcccgaagtgctgggattacaggtgtgagccacagcacctggcctgatttccttagtattttttaaactgtggtataatacatttaacataaaatttaccatcttcactatttttaagtatagagctcaatagtgttaagcatatacacaccattgtgcgaccaatctcaactttttcatcttaaaaaattaaaactctatgctattaaacaattttccatttcctcctgccttcagcccctggcaaccatgattctactttctgtttctctagatatcctaggtgtctcatgtaagtggaatcataacagtctttgtctttttgtaactggcttattatttcactttgcataatgtctatgttgtagcatgtgtcagaatttctttccttttaatttttattatttattttttatttattcattttttgagacagagtctcactctgtcccccaggctggagtgcagtggcgcgatctcgactcactgcaacctccgcctcctgggttcaggttattctcctgcctcagcctcccgagtagctgggattacaggcatgcaccactacccccagctaactttttctatttttagtagagacagggtttcagtgtgttggccaggctagtctcaagctcctggcctcaagtgatccacccgcttcagcctcccaaagtgctgggattacaggcctgaacccccgtgcccagctgcctttttaacactgaataatgttccattgtatggatatcgcacactttgtttaccccttcatctgtcaatgaatggacacttgggagattgccttagttttaacctaatgtctattttctgacccaggatcccatccaagatatcacatttatttagtcatcatatctcctcaggctcctcaagtctgtgacagtttctcagactatcctttttttaatgaccttgatggttttgaggagtattggtcaggcattttatagaacatccctcctttgggatttacctaatgtttttctcatggttaaactagggttatcggttttacgaaggaagactacaaaggtaaaagtgccattttcatcacatcaggtcaagaatacataccatcaggccgggcgcagtggctcacacctgtactcccagcactttgggaggccaaggcgcgtagatcacttgaggtcaggagttcaggaccagcctggccaacatgatgaaactctgtctttactaaaaatataaaaaattagctgggcatgatggagtaggactgtagtcccagctacttgggaggctgaggcagaagaatcgtttgaacctgggaggcggaggttacagtgagccgagatcgcaccactgcagtccagcctagataacagagggagaccctgtctcaaaaaataaaataaaaaaaagtacatactgacaacctgacttatcatcatcattattattattattattattattgttgttgttgttgttgttgttgttgttttgagacagagtctcgctctgtggccgggctggagtgcagtggtgcgatcttggctcactgcaacttccacgcccggcctgacttctcatattgatattgactttgatcacccagctgaggttagcatttgccaggtttctctaaatttactcatttctctccctttccacactgtaatctttggaaggaagtctttatgccagctcacatttaaggagtggggagttatgctccactggttgagggcagactatctacgtaagttatttgaaattcttctggctgagagatttgttaagaataagttttacggctgggcgaggtggctcacgcctgtaatcccagcactttgggaggccaaggcaggcggatcatgaggtcaaaagatcgagaccagcctggccaacatggtgaaaccctgtctctactaaaaatacaaaaattagccgggcatggtggctcgtgcctgtagtcccagctacttgggaggctgaggcaggagaatcagttgaacccaggaggtggaggtggcagtaagccaagattgtgccattgcactccagcctggagtcagagcaagactccatctcaaaaaaaaaagaataatttttatttttattttttttgagacggagtttcgctcttgttgcccaggctggagtgaagtggcgcgatcttggctcactgcaacctccacccgccagggtttaagcaattctcctgcctcagccccccgagtagctaggatgacaggcacccgccaccatgcctagctaatttttttgtatttttagtagagacggggtttctccatgttggccaggctggtctggaactcctgacctcaggtgatccacaagcctcagcctcccaaagggctgggattacaggcttgagccaccgctcccagcctactttttactttttttcccctcatgtcagatcatcaaatgggtatgtgctgacgtccacatcgtaacaaggttggagggaggcacgtcttacacatgaccatgaatacctgatccttatgcttacgaacagcaaaagaatctctctctctgtttttgagagaaagtcttaactctctcaccctgagtgaagtgctgtagagccatcataactcaccgcagcctcaaactcctgtcctcaagcaatcctttcaccttggcttcccaaaatgctttacattttttaaaagttgaaatgggtgggggcacagtggctcacgcctgtaatcccagcactctgcgaggccaaagacaggcggatcccttgcggccaggagtttgagaccatcttggacaacatggtgaaaccttgtctctactaaaagtacaaaaattagccaggtgtgggggtgcacacctttgtcccagctactcgggaggctaaagcatgagaatcacttgaacctgggaggcggaggttgcagtgagctgagattgtggcactgcactccagcctgggcaacagagcaaggctctgtctcaaaaaaaatttttttaagttgaaatgattcaaaagaataatattttggggatatatgaaaatggcataaattcaaatttcagagtccacaaataaagttttattggaacacagccatgctcactcatttaaatattttctacagctactttcttgataaaacagtagagttaatcgttgcaaaagagactgtatggccttcaacacctgacatatttactatctggccctttacaggaaaagtttgccaacccgtgctctaaggtttacaatacgcatctttagtttatcacagttttcctccaaacaacattatatcacatcatgtaaaagttagaaacataaactagcatattttcttcttctttttttttttttttttttgagacagagtctcgctctgtcacccaggctgctggagtgcagtggcatgatctcagctcactgcaagcactgccacctgggttcacgccattctcctgcctcagcctcccgagtagctggggctactggcgcccgccaccacgcccggctaattttttgtatttttagtagagacggggtttcaccgtgtcagccaggatggtcttgatctcctgaccttctgatccgcctgcctcggcttcccaaagtgctgggattacaggcgtgagccaccgcgcccggttaaactggcatattttcttttcgcccctttatgcttcatggtattgttatcatacattttatttctacatatgttataaaccccatagtacattgttatgcttttttctttaggtagctgatgatcttttaaactaaattttaaatgagaaaaatatattttacatttactcacatattttccatttcttgttttatttattcctttgtgtagctccaagtttccatctggtatcacgttccttctgcctgaaaaactttctttaacatttttttttctttttttttttttttttgagacagagtcttactctgtcccccaggatggaatgcagtgacatgatcttggctcactgcaacatctgcctcctgggttcaagcaattctcctgcctcagcctccctagtagttaggattacaggtgcctgccaccacgctcagctaatttttgtattttagtagagacagggtttcaccatgttgggcaggctggtcttgaactccttacctcaagtgatccacccgccttggcctcccaaagtgctgggattacaggagtgagccaccatgcctagtctctttaacattcttatagtgtaggtcgactgatgccaaagtctcttactctttgtgtgtgtgaaaaagtctttattttgccatcattttaaagatattttcacttgggttagagatctacgttgagagtactttttttctccacaacttaaaaaattgtgttctattatcttctggcttacgttgtctctgacaataagtccatgataattgttatctttgtccttccatatacaatgtctttttccctctggcttcttttaagattttctcatcatctcagattttcagcagtttgattataatgaatcttgctgccgtttactatctttatagttggtattgagattcttggatctttgagtttctagttttcatcaaagttggaaaacttttggtcattatttcttcaaatatttttctgttttcctgtttctcctctctttctggacttcaactacaagtatgtgagagcacttgatatatcctgggaataaccatggctctgttatgtttttggttatttctttccacgttcttcctttcagaaactttttgctgataatgtcttcatatatcttcacgtttactgaccttttcttctgtgatatttcatctgctgttaatcccatccattcaaaatacattcaaattatatttagggccgggcacagtggctcatgcatgtaatcccagcattttgggaggccaaggcaggtagatcacctgaggtcaggagtttgagaccagctgggccaacatggtgaaaccctgtctctactaaaaatacaaaaattacaaatacaaaaattagccaggcttgatggcagcacccggatagtttcaccagataattggaattaataaaaaatgaagaatcaagtggagtcttagagtggtgaaaaaatataataactgaaattgagaatttatttcacaggacaaaaggcagattagatagagcagaagagggaattagtgaattggaagcaggtcagtagaaaatactttgcttgtagcatagagagaaaaaggaaaattggtgaaataggaatccattccctcttctgctctatctaatctgcctttagtcctgttaaataaattctcaatttcagttactatatttttttccactctaggactccacttgattcttcattttttattaattctaattgtctggtgaaactatccagctgcccaccaccaagcctggctaatttttgtatttgtaatttttgtatttttaatagagacagggtttcaccatgttggctggtctcaaactcctgacctcaggaatttcactagctactcaggaggctgaggcacgagactcacttgaacccgggaggcagaggttgcagtgagccaagatcacaccactgcacttcaacctgggctaggtttaaaaaaaaatctatatttagattttgtgattttcatctcaaatataatttcaatttgtcagtctatggttgtttctttggagaaatatgcttttgttttcttggtgctttccagatttttccctttgaatttaatattttgcagtttaagtacaatgtgcctaagtatgatttctttgtattaaacctgtttagcttgatgtcttgtgttagttatagaaaaattttggccagtaatattgtctctaccccattctctctctcttctcctttttggactccagaaatacctatgacagaagtttttattgtgctgcatataatattaatgacatttttgtgttctctaccctttttctgtctatgctacaatcgaagtattttctactgacctgtcttccgattcactaattccctcttctgctctatctaatctgcctgtagtcctgtgaaatgaattctcaatttcagttattatatttttttccactctaggactccacttgatttttcattttctattaattccaatcatctggtgaaactatccagcttttcatctattttcttatacaaagtaatgatagttagttcaaaactccaactgataactccagtatctggatctcctgtgagattgtattttctatggtttgcttttctcttggttttcaggtattagtccagtttcttcttcacatgcatggatgtttttcaatcccttctaagtcatagtagaattttttttaactttgaagcagtctcaaatgtacagaaagatcacaactatagtacaaagaacatttttcctgaaatcatttgagattaagttgccatcaccactcaaacacttccatttgtaattcctatgaacaaggacatcctcctaggtaaccataaaactaccatcaaaatcaggaaattaacactggtagattactgccagctaatccacagcacagactctattcaaatttcaccagtgtgcccaataatgtttttatggcaaaaggatccagtacagtatcacatattccatgtagttctcagttatctctggtctttttaaatctggaacagttttttaatctgttcttaacttcgatgacactttcatagattatgagccagttattttctagaatgccccttaatttgggctcattcagtgtttctccatgattagattcaggttatgtattgtgtgcaggaatatcacagaagtgatgctgtctttctcactgcatcctatagatggtacatgattctaatttatcccattgctgttcatgtccactttggtcatttgattaaggtggtgtctgataggtttctcccctgcaaagttactgattttctctttgtaattaataagtattttgtggaaaggtgctttgagaataagtaaatagcccattcctcaacaaacatcccacgtattcatgtatttacaacagtatagagtcatggattcctattttattctgtaagttataatccattgatattattatttattgtgacgctcaaactttccagctgcagccagtggaagccccttctagctggcttccgtattgttttgacacgtctccattgctcattctttgagcacttttcttttctttttttttttttttgaacagctttattgaggtataattcatgtatgttacaattcacccatttaaagtgtacaattcaatggttttaagtgtattcacagatacgtgccaccatcaccacagccaattttagaacactttcattacctctaaaacaagtcttgtaacatttagctatcatccccctatcctcccacccactccagcccctggcagctactaatctactttctgtctctgtatatttccttattctacatagttaatacaaatggaatcatacaatatgtagtctttggtaactggcttctttcacttagcataacgtttttgaggtttatccaggttatagcatgtacaattacttcatccttttttatggctgaataatattccattgtaagactgtactatattttgtttatccatccattgctgggcatgggggttgtttctaacttgtggctattatgaaaaatgttataaaaattcacatacaggcatacctcagagatattgccaattcagttccagactgccacaataaagcgaacattgcaataatgtgagtcacgtgagtactttggtttcccagtgcatataaaagttatgtttggccaggcacagtggttcactcctataatcccaggactttgggaagccaaggctggcagatcacttgaggccaggagttcgagaccagcctggccaacatggtgaaaccccgtctctactaaaaatagaaaaattagccaggtatgttgatgtacacctataatcccagctactcaggaggctgaggcaggagaatcgcttgaacccaggaggcaaatgttgcagtgagccaagatcgcaccactgcactccagcctgggcgacagagtgagactctgtctcaaaaaaaaaaaaaagtaatgtgggaggatcacttgaactcaggaaatcaagaccaccctgggcaacatagtgagaactcatctctatttaaaaaaaataaagaaaggaaggaaggaaagaatgaaggaaggaaagagagaaagaaagaaagaaagagaaagaaagaaagaaagaaagaaagaaagaaagaaagaaagaaagtaagaaagaaagagaaagaaagaaaatacattattgcttaaaaaaaagaaaagttaacaatgttaacaatcacctgagccttcagcaagtcataatctttttgctgatgaatggtcttacctccatggtgatagctgctgactggtcagggtggtggctgctgaaggttggggtggctgtggcaattggcaatttcttaaaataaagcaacagtgaagtttgctacatcgattgactctttcgagaaagatttttctgtaacatgtgacactatttgaaagcattttacaccagtagaacttctttcaaaattgtagtcaattctctcaaaccctactgctgctttatcagctaagtttatgaaatattctaaatcctttgttgttgtttccacaatgttcacagcatcttccccaggaatagattccatctcaaaaacccactttcttggctcatccataagaagcatttcctcatctgtgcaagttttaccatgagatcgcagcaattcagtcacatcatcaggctccactaccaattctagttccttgctatttcaaccacatctgcagttacttcctccactgaactgttgaatccctcaaagtcattcattaggattggaatcaacttcttccaaactcctattaatgttagtgttttgacctcctcccatgaatcataaatgttctccatggtatctagaatggtgaatcccttccagaagctttaccttgcccagatccagcagaggaatcactatctctggcatttcctatagctttaggaaataaattccttcaatgataagacttaaaagtaaaaattactccttgttttgtgggctgcaagatggatgctgtgttcgcaggcaggaaaacaacattaatctccatgtacatctccatcagagctcttgggtgatcaggtacattgtcaatgagcagtagtatcttgaaagaaatcttattctaaacagtaggcctcaacaatgggcttaaaatattcagtaaacgtttctgtaaacagatgtgctgtcatccaggttttgttgttcaattcctagaccgcaggcagagtagatatagcatcattcttaacaagactagggcttgggtttttttgttttttgtttcaagacagggtcttactctattgcccaggctggtgtacaatggtgtgatgtcggctcactgcaactctgcctcccagtttcaaaagatcctaccacctcaacctccccagtagctgggactacaggtgcaggccaccacccccagctaatttttgtattttttggtagagatggggtttcaccatgttggccaggctggtctcgaactcctgacctcaggcaatccacctgccttggcctttcaaagtgctgggtttacaggcatgagccactgcacccagacaacaaccctagggtttttgcgatggtaattgagcattggcttcaacttaaagtcatcagctgcattggtccctaacaagagagtcagcctgtcttttgaagctttgaaaccaagcattgccttctcctctctagctgtgaaagtcctaggtagcatcttcttccaatagaaggctgttttatctacatcgaaagtctgggaaccaggcacagtggctcatgcctgtaatcccagcactttgggaggcctaggtgggcagatcacgaggtcaaaagatcaagaccatcctggccaacatggtgaaaccccacctctactaaaaatacaaaaattagctgggtgtagtggcgtgcacctgtagtcccagctactcgggaggctgaggcaggagaatcgcttgaacccaggaggcggaggttgcagtgagccgagatcatgccactgcaccactgcacttccgcctggcgacagagcgagacttcatctcaaaaaaaaaaaaagaaagaaaaagaaagtctgttgtttagtgtagccaccttcatcagtgatcttagctagatctgaataacttgctgcagcttctccattagcagttgctgcttcaccttgtacttttatgttttggagacagcttatttccttaaacttcatgaaccaaccgctggtaacttgtaacttttcttctgcagcttcctcgtttctctcagccttcatagaattgaagaggccttgccctggattaggctttggcttaagggaatgttgtggctgtttgatcttctatcactaaacctttctctatatcagcagcataaggctatttcagttttttatcattcgtgtgttcactggagtagtacttttaattttcttcaagaactcttatttgcattcacaacttagctaaccatttggcagaagaggcctagcttttggcctatctcagctttcaacatgcctttcttaatgagtttaataatttttagctttgatttaaagtgagagatgtgtgattgttcctttcacttgaacatttagaggttattgtaaggttattaactggcctgatttcaatagtgttttgtctcaggacacagggaggtcaaagagagggagagagatggagaaatggctggttgacggagcaatcagaacacacacaacattgattgattaagcttgtcatcttctatgggcatggttcatggaattccaaaacaattgcaatagtaacatcaaagaccactgatcacagatcatcataacagatagatacagtactaatgaaaaagtttgaaatattctgagaattaccggaagtgacagagacacaaagtgagcacatgctgttggaaaaatgaagccaataggcttgctcagtgcagtgttggcgctaacctttgatttgtgaaaactgcattatctgtgaagcacactaaaatgaagtgcaataaaacaaggtaagcctgcacaagttttgtacaaacataggttttcatttctcttgggtatccttaggaatggaattgctggttcctatgatcactctgtttaatcatttctgagcactttattttctggcacaagaggattcaggcttatcttgtactttccctgccttatccctgtaattagccattttgctaaggagccctggtttcttccagtggacaatggcacttagacattaagacttgggtgctgtcggagggtgcggtggctcacgcctataatcccagcactttgggaggctgaggcaggcagatcacctgaggttgggagttcgagaccagcccgaccaacatgctgaaaccccgtctctactaaacatacaaaattagccgggcgttgtggcacatgcctgtaatcccagctactcaggatgctgaggcaggagaatcgcttgaacccgggaggcagaggttgaagtgagccaaggtcatgccattgcactccaacctgggcagcaagaatgaaactccttctcaaaaaaaaaaaaaaaaaaaaaagacttgggtgctatcaaagcatgatgtaagctgatttaaaaaaaaaaaggcgctgggcgtggtggttcatgcctgtaatcccagcactttgggaggctgaagcgtgtggatcacgggtggatcaagagatagagaccatcctggccaacagggtgaaaccccgtatctactaaaaatataaaaattagccgggcttggtggcagattcctgtaatcccagctactcgggaggctgaggcaggagaatcacttaaaccagggaggtggaggttgcagtgagccgagattgtgccaccacactccagctggtgacaaagtgagactccatctcaaaaaaaaaaaaaaaaggcttgggtgctaactacactcattattattaatatgtcatggctcccaggccctctcaatggataaagccagaaaatatctgtatgtatacacataagtatacacacattgacacatgcacacacaacataaacacatacatacatgcatttgcatcaatatttatttctacacctggctattttgtttattcttgtttcgtagagatgggatctcactatgttacccaagatggtctcaaatgcctggtctcaagtgatcctcccacctcggtctcccaaagtgttgggattataggcatgagccactgcacccagcctctacatctctccatgtattttggaaataatgagttcttcccattacctccaattccaatccaggtgtataggattacaggtgagaacatcagagagttcattcttgtttcctcctcctcttctcttctcttctcttctcttctcttttctttcgagatagggtctcactctgtcactcaggctggaatgcagtggcctgatcatgcctcacctcagctttgacctcttgggctcaagcgatcctcccacctcagccttctgagtagctgagactacaggaacgtacccctgcgtccagcaaattttttgtattgtttgtagagacaaggtctcaccacattgcccaggctggtcttgaactcttaggctcaaatgatctgcccatcttggcctcccagagtgttgggattacaggcataggcccctgcacccaggcttcttttccatattataattctctttgccaacagtgagaaacctagctcactttttctcactgggtcagttctactgaatataactgttctgcagtgggcaggtccaggcaaacctatccccaaaggtaatgaagctattcccaaaagtgaggaagctgagaggctaaagaaagaggctgacaaacccagtttctcagaaagaaacatttaacaaggaattaaaacgagaagtcacgtctgacatcagcaagcaaaatggcggatccccacactgttgccccccaaccccagggcttgtataccacagggcggcaatgttaggacagttgaaatcggccccctggggaaaggcaagaatgctatgtgcagatgcctaagggcaagatttagctaacagtagttaaagtagatatcttagacgcatccctggaactggggttactcagaagtcaacatggcagattagtatccaagatggatttgctttagcctccacggcaaccgatatcccatgccctccaccccacccagaccctcctcagcgatcctgggctctgacaccctgccctgggccagcctacaacatggatgcctctttgtccctcagactccagcatgccacgtctttacccacacggaagcaaccctcagccttcgtgggctctgacactctgcctggggccaccctaccctcacctccccacatggacgtgctcctccactcaggctctgaggttgcacatcgagctccccctggatgccctgcccactcctgcaggaatgcccttctcatcccccttgaactccccttcttggggcttggccactaccctggccagatgccctcttcacctttctcatgactcactctcccttgctgagctgggacccaagtggacatcctccctaccttgcttgggttttaacatcccacactgggctgccctcccacttggatgtcctcctctgtccctctttctcctgctctggccacccccaacatcggcaacaccctcctcacttaacttgagctccagaaccatttgctgagccactgcatctcccatccaccctacccctggggacccctgcttactccaccctccccaatatcttctggactgaattgtttttgttttgttgtgtttaatgtcaaccagaagactgaattgtttttgaagggaaggaaaggaaaagaaacggaagaagaaaaaggaggaggaggggaagaagaggaggagaaagaagaaggaaaaggaagaagaaatagagaagaaaacggaggagaggaggaagaaggtggggaagaaagaggaggaggaagaggaagagagctgcctggccaaattttgtggaatgttggatgttgcgggtgacagactgtagaggctgtggctgatgtcatcttctttcagggagaatttgattgcctcctggtagccagatagcatacagggaagtcatcttgatgcagtgaagctggtctaggtccagtttgcccttattcctgggtgtggctctttccagggtctcacctgtaagccacattgatggaagtagagaccgtgcttgcaaaaaaaattgaggctggggtggggaggagagagcccagaggtgatctgggggctcaggagcgcaggatggtggggggacactagtgtgtatttgtcggtggatgggaaggaagttcatcaagtgggaggtggaggcagcccagggagaacagggactgtgggtggcagagcaggagggtagggccctctgagcctgggggacagcaggggttgcaggtgggggtggggggaagccagcaagcttgcttgttgggggtataggattgtggtagggtcctgcctacctccctgtggagaagctggagaggggcagggcagccccggtggtgtgggcagatggagaagggatgggatgcagtgagggactggggctcaggtggaggagggggccaaatgtggggaagaggctcagtgaagggagggaccctccgcggggaaagagttcagtgagaagagcgggaggcgtcatggaggccccatctctttatctagctggggccatctgagagcagtgactgtacccccatccaactctgtccctcccccgcaacatggaggccccagcccaagacttgcagtggggagtgggggggcagcctccagtgtttgttcttgtccaaggctggggtggggagcaataagccaaggccccagactttccgcctcatggtgggtgtgggccagggaggtcctgcacccactgcccgccctctaaccagggggctgagactttcgcccctgggtgctggtgcctaggaatggaggcagggaaagggctgggggctcactctcccctccctccatgcactgcaggggcaggcagtgggacaggcagtcgagctggatttgtttctcattcgctcttggctcctctggtggaaaaatcgaagcgctccccctggtactgctgaggcggagagggtgagcgtggctgggaggctgtcctggcagggaagtccaggggcaggcggggcctggccggggagaggctgccccctgctcacaacccccttcccagccctcttacttcgacgtggctctctaggcccagtgggaagtcctgcctcagctgaagtggaggggccgggccagggaggaggtcggactgggcttgggttcagcctcaggctcgtagcaccctccttccctgggcctgtctctagagcagtctcccaagggtgatttaaaatcccccgagggtcttccaaggaagtgctgtcaagctgcagcaggagggggccgagtcagacctgggacaggctttctcagcattcagactttgcctaagtgggaggtgagctgtgtactaggaggggagggttccacaggcaactgctggatatttcctgaacatccagggacatgagaagccttttctgtacatcatcccatgtggccctcacagacaccccaaggtcagtattagccatcccatttacaaaaatttttttaacacacacggttttgctctgttgcccaggctccagtgcagcggcgcagtcataactgaaggcaccctctaactcctaggctcaagcaatcctcctgcctcagcctcccaagtacctaagactacaggcacaagccaccacacctaactcatttattttttttgaggaagggcctcattatgttgtccaggctagtttcaaattcctggcctcaagtgatccacccacctcggcctcccaaagtgctgggattacaggggtgagccaccatgcctggccccatcccattttacaggtgagggacttgaggctccatgaagtcaggtgccccactcaaggggctacacagcctctacgtggcagggctgggatttgaacccagttgtgtctggctctttcccaaacactggaaaaggcaggcctttttcccctccaccccagggcccgggagcccctgagcagctcctgggtggggctgccccacagggagacagccttgggggaacccaggaggtctttgggctgtggcctgtctctgtggcacagtggggtgcctcgggagatctcccctccacctaccctcctcttgtggagttggacccacccccaccccattttttcagagggccctcaccccagccctctccatcccggtggaaagaggagcccaacctctttccctctggaatccgctgcctcggctctccgatggagagaccatctggagtgcattatgggcagaggagaaagccgagagcaggaaaatgtgagttggccccagcagctcccgtctgcaggggggcggcgggggctcaggggatgggccaaccgctgcctccacctccccagtccctagaaggggcagataagagatgtgctcaggaaagggtggccaggagagggcagggcccaggcctccaacacccttgcagagcccagtttgaacctgctaatcttgccaacctgcccatttcacagagagaagactgaggtccagagaggggtagtaacttccccagggccacacagcaaccctttcacaaatatgcacatgccagtgggcactgaaagtctccagtgttgggggcaggcggagttagcgctgggagtgggaaagaggccggggtcagcctccagagtaaagtgaaggcgcaaagcctcatgcaaacatcgaggaatgccttcattgtttcgaggtctctcttcctggcctcccaagcccactccctgccccaagtgccacccttccctggcacctgatccctgaggacgttgggtcctggggtgggggcctctgggctcttcctctgggtcccaggagccccctccccactctgtggccccagctccagacttggcaaggcaagccggagtgaggtttctccactccctcccaagtgctgtgctggcggctcccgaaataaaaatcaaatgtgggcttggcaaagggagcggggtgggagaagcagcggcagcagggctggggcttcattctttccattgtaacttcacctcctaacctctggcattttaattatgtctcctacccccctcactctgcctgggccagggggtgagctcaccctttcctctagcctgggagggggcagctgctgcctggacccccagtccccggcctgctcgggggaatctgggtggcggccatgctgggggtgtcggcctcaggctccctccagcttctccagtctcagaggggcctggagaggggcccagcccccagacagccagccgacacctcaagttccatgtgtgaatcattagtcttcacacccactgctccatttagtggtggccactgtcctaaggcaaggcacggcaggctcaccagcccattctatggatgacttagccatcatcgtctgcagggccaagcctgggcccaggcctatcgctcctggttctgcactctttccaaacccaggaagaggggcaagaacagctcaggcctgataatttgccttatctcttcgagtgtccgtttttttccaatggtaagtgatggaaagcattattttgatactaaaacatacaaggacatagcatggggtaggaagtaaaatgcctgtgaaagttcaaggtagaaaacaaatcctcaaggaagatctcgtggggctctctgcaggcgggccccagggagtagcatcctcctccttggcatggctgtggactggagtgagatgcagtcatatgtgtttgtagccagtttgtgcagacccaaggctgctgtggaagatgccagtgggtgctgggtgctgggtgctggcaggcagccttggcccaccccaggatgcagaggccttcttccctccaaggcccacagtgggagtcctgccgactctctccgtctcctggggagggaaacctccacaggacaagcagcctgtgtgggggtgggggctgcctccacggacagtgcaggcacagggcaaccttgactgtgagcccagggccagcacccaaccaccccaactgaggcttcctctccatcctctgggaggtcccccgccacactgccttagaggcccagcccctcgaggaagccctcagttttcttctctcttgccctcccagtctccccaaatgcatgttccatcagcaaactctgccccaggccttgctacggcctctgctctggtggaacttccggatgaagagggtgaggcgctatttaccatactgggtgctgtgatgggggagattaaggtgacagcagctccgggaaggggactcctgacccaacctctggtgtgaagagcatagagaaggcttcccagagtgaggggtgaccaggaggagcccgggaggaagagcatggagggcagagggagcagcatttgcaaggcccagaggtaagacagtgcctagggcagggcccacgggagcatccggcctggagggagcggccagggtcctgggagctgcgcgagctgttagggtgcatcttaggaagatttctgggcaggctgtggaggatgggttggaaggtaatcagaacggaggtggagtgacctcttagaaggctgccacagaggcccaggtgagaggtgatggtagccaggcccaggccagtggcagccaggtggaaagaggtggccagactgataagagatttaaaaggcagaagccagaggacttggtgactgatgggcagaaggatgggggccagtgatctgctcaggctggctcctgggcttctgaagaatgaatgaacgaatgaatgaatgaatgaacaaacgaactgggaaacagcaccagatctgaaagccccaggtttcagcttgatcgtcgggctggggagtttgctgctgcacttgcatttggtacacctgcagggcatccaagtggaggtgcccatgagatggctggacgcatggaggtgccctggagaaggtggagagagaggaagccggcacagcctgcaaagaggccagagaatgagtagccagagcccctgaagcctcacaggaggaggtcttagacaaggcacagccaacagtgccaatggcaagagatgaagcaggtgaggcccaagaagggacatgtgttctagggacccagaggcttctccctgtcccccagcctttccttctgtctgtcccccagcccttgcccacccctctacgctccctcccccggtctttcccctatagtactctttctctcgatctcctcctcgtctctcagaccagaaggctcaacatctttctaagggaaacttcgtgctactcccaccccactggggtcctggttgccctccctagcttctgaaatcaccccccacacccccaacaaccaccacatacacctttcaccagagactcacccagcgcttccagaagctggggcaaagaggagcacacacgaccacctgcctactgagcagctcacacttcctccaatggagccaccacaaggtaccggcctccagggcaactgcaggcaatcctggccctcagggccttatggcataaaagggagagaagccatgaccccagcaggcctatgcagacacagtgagagaagaggcccagagaaaaagctatggacgtttagatccagtggagggatctgagtgggcttcctggaggtgactctgcgtagggccttgaaggactggcaggatttagtcatgtggcaatgggagcaaaggcagttgcaggaagagggagtgcggtgaggaaaggggtggaggtgggaactggggctgacaccagggcagccagtgctcatagtggctggtggctgaagagtgtggccagaggggtgggaggcggcaaggtggagggccacatcacacaggctggaatgcggaaggactttagagtttatccactgctgcctcttgacgtggggctttcagatctggtgctgtttcccagttcattcattcattcattcattcaggaaatattgcttgcttggtgctagacaagtgccgaagatgctgtgagaggcagatagaagtccctgctgtcacggatcttaagttccaggaagagacacagatatagagtcgtgaacaagtaaagactaaaaattaaaatcatgatgggggatgccatcatgactggccactctgaaggccgggcttgtgtcctgtctcccctcagactgagggctccctgagggcagagcctgtgcctgctccatcagacaaaggtagaaccagcttctccatcaggctagaagcaccctgagactcagggagaggcatggagcatctgggaacaagagctgaggtgtcctagaaacctcccaggaacagacccagggatagaagttggcaggcaactggcaaaggaccctcttcccagccaggccaaatgtgggagggcttccctctcctcctccccatccagcccccgaccccattaaacctttaaattaacttcagctccaccccgagctatagagagtgccccaaaataaatcctaaattacatgctgcttgggggcaaccacagttctccttcctccctctccagcaagcagacccgcccgacaccgtgctgagggggctcccccaaaatgggctatttatacagctcctgctcccctgtttgctctctggccctgttgtccttgagtgaggcccaagcaggctatacagctgtcttgggagggtgaagggagtgggagaggctgtgagccttgccagggtctgactggccatgggggatgtaatttttagtccaaactaggatactttggagtgctcgtagcagttacacccaggcaatgacataggtctgaactgtcctgggcacacggggtatctggtcacccagcgatggggctcagactccagcctctcagccacccagagcattgccttcttggggatgagagagacagagagagagagagagaagagagagagagattgccttcatccccgttgctgagacaagcagttctgaatatgggggcactggggctcccataccacctggcaaagcagaatgggctctggcttcaaggactcccaggcacagagaggtcctgcaggagggtctgggcaaagaagtggggagccggatgtggctgttttgagaccacaggcttgggtcaggggcctccctctccctggacaaagccaccttccattctgggaagctggccccagatactggagctgctccccttagggaaaagagagagggggagggagaggagaaaagggagaagagagtggaagatagagaaagacaggcacacacaaagaagcggcagagtgaaggacagagacagaaacagaggtgggcaatgacagagggagggagagtggggaaggggtgcttccagagccccaggatggcagcacccccttcctacccacagggcccgctgtggtagccctgtgggctccgcaccgcaccgctctctctgttctccaccccaccgcagtgaagtgggggcagggcctctgctggctgcccaggaggacacccgccgctcctccactgcctccctcctcaagactagcagtgggtggctgggcccagatgcctgctccccggctgctggcgggctcaggtgtctgcagagcgtcctcctgctccctgccatccttgcacgcccctctatttcaggcagcctggcccctgctcagtgccctctctggaagcctgctccttggccagcagacctggctcccccaggtccagcctctacctgcccgctcctcccgtccccttgagggggctttgcttcaaaggggtggagctagggctcctcctccctgtgaggttgcgctgggggtaggagcctggaggggagtcagaggcagggctgaggaaccagaggctcctctcactctgagtcagtcacagggaggggagggtggagggggcggcaaggaggtggaccgagaaagagccggccacagagatgtccagggaatggggcagggctgggtggcagcatcacagtgtctggagggccaggtacacatccaagtgcacaccgtcatgcagcgatttagagacgggccccaacctctgcaggcttcagccttggattgtgaacagaggggacacacagcacaggaccagctgaccagatcccagccaccgcttgtttgcactcacaagtaaattgatgccgacaacctggagcggagggctggtggtgtgtgagtgtgagtatgtgtgtgtgtgttgggagaataacagaggattcaaccagtgtcacccaaaaggggcaaggaccccgcagcactgggaaagggtcacaaaagccttcctcgccttagaggagtcaacatgctgtcttcccaatccaacttgattatctgtctgctcagcagcccccatgatccccacctcccaagaaaacactgtttatggggcctggggcatcaggcctgtcatttagctggaggaggcaacccaagccacaactgggagctgagccctgtgtggagaggcaatgcccagcctgaggcaggcaccagcccagacacttagtgccctgtttaccctggcaagggtggctggcacaggtgggcctctccagggagcagctggtggccctgccagcagactcccctgcaggccagagaggaggccaggacagcagctctccaggatggggagggaggcaccttgcccgccgcacaccctgcactgcagtttgcagggtgccagcctctgaagctcaggggtctcccagctgccctgcaagggagaccatatggcccagggcccagcaggagaaaccacagctccaggatgctggacactggtccccaaggccccccaggggaggctgaaggaagccccaggtctttggggtcctggtctgataggcccagatgccactcaactccccaggtttgtgggacccaccttctgcatccaaaggcacatgtaacttggcataaacaaacaccctttccccatcacagcccatcactacacagtcgctgtacccacagtccttctctatcacacagatggtatagaacatgctcctgcactctgccacacccaacatacacatcatccagcacccagctcacaaacgcagcatacacacaccagacacacaatgctcacccaacacagctccttctccacccgcataacctccactccagcagcaaggtcacatttgcttgcatgcgtgcacacacgcacacgtgcgcacacacacacacagtcctctgaaccaatacactctcctcccagtgccacacttgaaagtgggcccaagtaggggccaccattttagtcctgggcttctccctgcccctcccactctccgtcctccctgccactctcggtcctcctcccacttcctctgcccgccttccactttctccctttctctctctcctagctgagcccctggccctgaggtctctttcccagcacatggtgggacacttgagggccacacatatgggcagctcccagcagctattaaataccacttcgcccacctctggggttttgaggggctgcaaattccggaggacaggaggcagcagctggcagctgctcagggcctcagatccccctgctcaccattcccccatgcaccgcccacccctcctcattccgggctgagtcatccccacatctggaacctctgcacatctggaagagctgaagcctgtgcaagcagctccacgtagacaccccctcccccctgctccatctcatccccatccctgctggcagttggggtccagcatcccccacctggagcaggacctcggttacctagcagcaggcactgctgggccagccttggggaccaggattgcccacaggtctctccccagtagcagtaacagtggcgtcttggtgcccaccgcagtaagcaggcagggcagtgctagccttggaggaggccaggcccaaggctgggggaggcaggagagccaggcagggaggaggtagtggtttggcccagcaggcagagggagtttatcctggcactgggccctgaagccaaacatcctccacgaacctcgcagacacatcaaagcccgcagggaaggggcccttccgtagaggaaacctacagtcctggaggcctgacaacctgactccgggcacaggaccaccctgtcccactcagcaacccaggctcaggtcgggcacagctgcctggagtggacaggcagaaaaggacatttctacccaggggccctgccgcctcaccccactcgttcagtgctgccacagaatgaggttttgcccccatgagggggcagagttggcaccagatttagctttagcccctagtacaggggtccctcccaaactgcccccctcccaccctccaggcagggaaggctgatggggaggggctcactttgtctgtgcgccaccctttcagccccagcctggaagagaagtcgtgctcagttgtggggggatccagcttcctcccccaggctctgatgttctgcagaagacccctccacatggacaagagggaaatggagagggcaggggggttaggggttgggagaaaaaccaagcttcaaaaagtagaagctgaagtggaatcagaaggcgagaactgggctgcaagccacagggcctctctctggggggacagctggggccggaggaggaagaggggttgtgaggcgctaacaagggagagaggaggtgctaacagggccactggggtgcggggatcctgaagccagccccctaaaggttggcccggagataaggaagccaggcactggcggtggggtaaggggtgtgagtgggagctgccaatcaacacaggaggctgggatgctctgcatacacacatgtgcacgtaatgtacatacatgtgcacatgcagctcccacacaaccaaagccaagtctgtcctcagctgggaaccagatgatgtggctgcttagaggcactatgatttgaggaagaatgtgatctctgccagcctgaatccctcacccactgctcacactcattctctgcctttacagcttcaggctgggcctgcgccccactctagtctaagccccagaccatggaagggctccccttcccatggttgtcctgaatccgcagttcctttggatctgaaaagttcttttaggtctaactacaaccccagtaacatttgggtcagaaacaaaggaatccacaagcagggtgcagcagaaccctcttttcaggagccaacaagaacagagctagaaatcgaggataccaaattcctttcttccgtctggctacaggatccggtctcagacagtagactgaaggagggggccccagaggaaggaggccaggcatgggggctctcaagaccctcacgctagtcttagctcagtctctcctgcccaagccttcatggctctgctccatctgccactccagaaaccaaagctcatcagctcaaccttcccctaaccctccccacctgacacccatccaggctctttgaggtgttttcctttccaccctggcctgtgccccagaaacctacactttagaaggataatggctcccaaatggcgtttttgtctctgctaagcctccaggaaagtgagcatcagtgagtccctccaacctgctcattgggataataagtgccctgcactgttaattctcaggtggtttgccctccctccaccctcccggcccacagattcatggttcaaacttggagctgactctagaagtgatctcctccacccccatgcccatcaccccaagaatgagaaaggggctggtgggcttcaatttccaaaaaaagttggaaaggggactgaggtccccatcccatggccaagaagtcctattcttggactctgcctcctccaggaaggcggaccgtaagccaagcattccttgctacacccccttaggagtcgctcaatccctacggagccatcttcctcacttgctgagggggagtcacaaatttgagcataccctttggagggggtgcaggaagcagaagacgtggattccccaaaccacacagccagtgtggtggggagcccagtcagtctgaactcctcccaccccaaccacgagtccttcaccaaggactttggaaatgaattccctacccccttagagaaatctggcccctgacccaggaaggcccctaaccagcttggattcaacgacaacagagccagtgtttacttggaacaaagcaccagggggaaatgcatgctgaatcagagctggccagcccctgcagcagggtgggagcattaggacatgtccacacgtcttcaagggaaaatggctaagggctgtcagagaggcccagggaagaggcctgggtaggggcgagcagggagcagacaatcacttgttgaaggaagatccaagtccaggtaggctttctggaggaggtggcatttgggctgagctttaaaggatggggaagaatgtgttcggtttctgggagggatttggggaagaaactaggtggaaaaaactgcctggacagaggcaaggagagaagcagaaagagtaagaggaggggctggagaacatggtggggggtgggggtcaggtggggactggttatgggggaccctgaaggtctctctgagatgggactttattcaggtggcagcagggagcctccgattagggaacaagagagcgacatgcccaacatggcctgtccctccttggcaatgaggtgaccaagctagaggccttgttgaatatggctacgagagtcctgaggagccaggctgcacggggtgccgatggcagtggggataaagggagaggacacctgtgacaggcacagcctccagtctccatgagctctcagcccatgtggagaggcgggcctcctctgtgaagtagacccaggcagcgctcagtgggctgtgcgggagtagaaagggggaacaaactgggagtggagggaatcacatctccagtcccagaccacgttcaggagtggtcggcacctggacggacatcctctgggatctgtcaccagccccaccttctcaggcctgactggccttaagtggggcccagtggacagcagaggggtttagtgagcaaagcttcctggggaaactggggttggatgctgcagcccatccagggaggtgagcagtccaaaagcagcgagaccctgcactccttggcaccccactctgcctccatgtgaaatgcagagaaggaagtatgggccccttgtctctgccaggaatgacagctagcatttatttgccattactgtatgccagactctgagcggcctgtttcatcctcatcatggcctatatgatgagggaggtactgttatccaactcctccctctccttcctgttgagagaggcccagagaagttccatttctcgtctaaggtcacacagcacaacatattcagtggcacactgactaacacgacacaatactgcccctacaggcagagccgggctagagcagagcattctgctggctttgaaaagagatcccagcctagtgccatcagccattacagatattagtgtccaccaaagtatgggggtgggggggactgccaagtaaaacagaattcaccctggctcttccccttcacccaagcctggccccctgggctgggctgagccaggctaggcgaggccacccaccctgagtgatcctccatccagagcagtggagcagggctccccaggcccgaggtgagtgccacctgtgctgggtgtggcgtcttgagcgctgcatggttctgatcctgactcagcccctcatgtcctgtgcgacctggccttcccgctctccaggccctggttgcctcctctgagaagggcgtaagtgggccggctggcctcggaggcccctccttccagctgggccccggcaggatgcacaatcagctcattctttagtgaatgcactgggggcccagcgagcgtttatgaagacatttcgaagtggctgctcttgggaaaccccagatggaatttggtgttgaatctagggggccgctgactacatgaggcctctgggtttctgtgctcgtgtatgcctgagcacctgcacacgctgccctcctggtgctaggtgacgtgccaaacagaagatgctggccttgtccaggaccctccttcctctagaacagcccttctctgctcagtctaggggggtccatggtgctcccacccccttctgacctcacccaccaaaaatccgagggccctggggccatgatgaatgctaacaggccctggtgttcttggcctggcctgggaccacccacttccaggctcctcatcttgtccccatctgcaggaaggaacgtagggcagtttggtgtcatggaactgggggcccagccgaggggctcaagagcccttcagactctgcctggtgagtcaagtgctaaggacctcacttcttcattggaagatgtggggtgggggtggagtttgttcctaggacattgtagcgatgtggatagcattgccagattttgttttgttttgtttttctttttagagcgagggtggtgctctgtcacccaggctggagtgtagtggtgtgatctcagctcactgcagccttgaactcctaggctcaagtgatcctcctacctcaacctccagagtaactgggactacaggtacatgccaccacaccggcttaattgcttttgttttctttgtttgcagagacagggtcttgctatgttgcccaggctggtctcaaactcctgggctcaagtgatcttcctacctcggcctctccaagtgctggggttataagcgtgagccactgtgcctggcctggttgccagttttaacaaagaaaaacacagaacatcccattaaatgtgaatttcagatagaaaagtaaattttagcataagtatgtctcaaatattgcatgggcccaggtgtagtagctcacgcctgtaatcccaacactttgggaggccaaggtgggcatatcacttgaggccaggagttggagaccagcctggccaacaaggtaaaaccctgtctctactaaaaatacaaaaaattagctggacatagtggcacatgcctgtaatcccagctacttgggaggctgaagcatgagaattgcttgaatctgggaggtggaggttgcagtgagctcacaccactccattccagtcttggttctcaaaaaatatatatatattgcatgggacataattatactaaaatgaaattattcatcgtttatctgaaatttggatttacctgggcctcctgtcttttgtccggcaaccctagatctgggtcaggttgatgccagagacccagagagcagctatgccagcctcctccccctcctcctgcccctcttcagggcactggtgcccgcctagttccctcacccccactcctgctgaccccccacatctgtcccttgagttcccacatgcccttctcagcaccctcatttcaccccgcagggtatcttcctcctctaagctcaaccattttcccattttcctctcccgtaagggccacacctctgtagggctcccagcctgggcaggatagcagggagtgtggggtagagaccccaggccttgctgttgcagtggggcctgggtggggacaagaagaaccctggcagcccaagttggcaacgactcaagaggtggaggctccagcactctcaggacgaggtccccctgccaaggtccacctgcaggggaggaggggagacggcggccccttcccttctccaagctcacagtcacttcaaatacagaggggccagatcccaatacccctcggatcaggagactagaagattatcttcttaaggggcaaaaagggctaggaggtaatgggaaatagagacagggaaagggagagagagagcagggagacagcataagaaacagaccgagagactgggggtgcaggaccaaaccagggacaaggagaagggaccagagaaaccgagaaaaacagacgcctccgccgaggcagacagaggtgaacagagagaggagaaacagacgggagaacagagggaaaggctgggaactcgagagaaactgggtgcggacagatgggaagaaaccgaaacagaaaaacagaggctgggagaaacggggagagacacagaggggttaaatataagacagagaacatgactgggagagatgagggagaagggtgagaggcagagagcaaggaaagagaagaaacgcccacgacgtcgggggtgtttttcaggggtcaagacagattggcgacacagcaggaggcgcccaaggacatgacgttgagcctctcagggtcccccttggccgggccagggagcagcgccccacgctccatcaccccctctccccctcccgcggtcctggctgcactgctcctgcctcgccctcgcccagcgcccccagcccacaagccccggccgcgcccctcccggctcccgggggcacccgcgctgggcgacgctgccacctgccggccgctcccggaagctccgcgcctggagtgctggaggcggcggccgcagggggctcagaatcaggcccctccgcactggggcggcctccgcggggtctttccaggaatctggatgggcctgctcgcccgcgccccggcgggcctggcagaggaccagccccagctgcggaccccggggcagtctaaaccctggggccttgagttcccgttttgtcaatgggagaaaatgcaccaacacctcctgtaggatttcaagaggggaggggacacgaaggtacccacgttgtgctcctggtcttccttcctcgacctggaaatctcagggcactctgaaatcagccaggctgctctgtccctccctttttggtcaaaacacaatggggtgatatcccccaaccataacccctcaaaatctaccctagaaccttcgccttcccctccctcaacctctgcccccatttgacttctcaccagacccagaggtccagataagaaggggcttccacgtccccttcccactcccgccggtcccggcacccctccctggagtctggggcacttaggagtggaggagttgggagttaggaaggcccagctcagcggtgtggagttgatcccacctctttttaaatttaggttatttatttatttatttatttatttagagatggagtctcactccgtcgcccaggctggagtgcactggcacgatctcggctcactgcaacctctgcttcccgggttcaagcgattctcctgcctcaggctcctgagtagttgggattacaggcacccgccaccacgcccggctaaattttgtatttctagtggagacggggggtctcaccatgtaggccaagctggtctcgaactcctgacctgaagtgatcctcccaaagtgctggtattacaggcgtgagccaccgcgcccgggaccgcttttttaaaaatccgttaatctcttctacctcccaaatcccaaaacccaacccagacctctgcgcctcccttcctcccttcctcctcccagcccctccctgccccgagtccgcctctcccggtgcagctccgcccccatcccgaggcggggccccataggtggagagaagtgggagaggtcgcagccccgccttctctacacaggaaagctcagtggcccccaagccaggatgtcccaagcttgggtccccggcctcgcgcccaccttgctgttcagcctgctggctggcccccaaaaggtgagactgggaggtaaggttgttgaacttttgggccctacccttgtaggtcaggagcctgcttctggagcctggtcgccaccttccagaatcaggatttcctcctgaccacacacagttagctacttcctttctctctttgctgtggaggtggaggtgggggcagcggaggaggctctgggagaggctgggttctcccacctctgagggggatcctgtggtgggaagtggccaccacccaccaccttatctgacacctagcacgtctctgtgaatagggactttggaccccttattagcctcagcttatccttccagctccttcccgcctgagctttggacacctgggccagcacttagccccagctcagttcctccagtgctgggggaccctgggatgtccccaccctctttgggactgtgtctctgcttgttccctaggggagagaaggctcttttgtccccttctaggggtaagtaatcccagcctgtggtgggatttgacctggctgcctgaccaaggctggggtgacctctgaaatctgtgattttgagagggaggtgtagggttcgagtgttccctccgcccttctgttcctcccaagtaaactctacaggtgatgggggaaagctgtccggtcctgggatgggtgtttatcctgggaacagagacgggtctagaacatgcatttgtgtcttatttccatttaagaaccggagggaagtcagggtcttccatagttaggattttagaacagggcaccttcacacatctgggctgagctttcagagaggctctgccaaaacccttccgtggacccgggttagtgagcaaggtgttccttctaaatcactgggcggtcagtttgtgtcaatgctgggctgggcatcctctggtttacccctcccaccaaccccaggggcgaggtgctgttaataccttcaattctggagttaagtaagctgagatttacttactcccagcccaagaccaccctgacgctccataaaactcagcctctgaaccaccccagacaagactaccccctggttaaaatgtggggagacaatctgggagaagagctcctccccctcccaaaccggaacttgagattaatttactaaacctgttaattatccattacttattagctggggtccaggaaaaggacaagggccagagtggggtctgagggggaaggggtgctgttgagtgcctggatggacccctcgatttgtctccaagttccctctctgtatatatatatttttaatttaaagaatagaggccaggcgcagtggctcacgcctgtaatcccagcactttgagaggccgaggcaggcagatcgtgaggtcaggagtttcagaccagcctgaccaacaaccccatctctactaacaatacaaaaattagccaggcatggtggcacgtgcctgtaatcccagctacttgggaggctgaggcaggagtatcacttgaacctgggaggcggaggttgcagtgagccgagatcgcaccactgcactccagcctgggcaacagagctagactccatctccaaaaagaaaaaaaaagaaaaaagaaaaaagaatagagacagggtctcgctatgttggccaggttggtcttaaactcccggcctcaagcaatccacccacctcagcctcccaaggtatttaggattacagggatgaggcaccgcacccagcctgtctccaattctatagtcattcctgtgtgctgtgtgatttggattcacagactcaccctttctgggccaacctgcaggggttccttcctgttcctgtccccacaaggggacaaagcctgtgagatggtactcagcctgggactgagcgtggaaaaggggaattaccccaactcttattggctatcactggtattcttatctttactgttgtgatttgcaattgaaatattttataaaggtataaagataaagataacggtggttttgccaaagctggcttcctattttttagccttggttgtttgtcccaggaggctagggtggggtgagagatgcccttccccaccacccatttcctatgttctggcacctacatccctcccccacagtctgggagcagccaggatgaaatgaaactaggtaattgatgaatgcacgttcattcattctgcaaatattttgactactgggttttcaacaatgatgcagcaaaaatccctgccctcgcggagtttgccttttacacaactgaaggacaattaacaagataaagtaaatatatagtatgttagatgttgacaagaggtgtggagaaaagttaagcacactaagggaaaagggtggttgtaattttgaataaggtaactggagagggaggagctggagccagccttgcagccacctagaagagtgttccaagtcagtgtggctttgacacacaattgctatcaatggagggaaattctgtaagatgccctgggtgccctgcagacctggtacagaagagggggaagctgatttgggaggcggggtcctggcagctttgcagagcatggaatcccttaggcagggatctgaaggatgaatggaggcttggacaggtgtaaaacagccaggtatgttcagggaactcccagcgggtgtgtgtgagaggaagagaaagaactaggggaagcgaaaggggagggagtgcagctgctcactcgggaggtctctaccccagggagccaccgaagggggcttccagcaagattctttggtgatgagatttgcattataggaagagtcctcctgcccacagtgtctgcagtgactgaaggtgggataaggaaagtcgctagtgccctgagccatgggtgtcacggtggaagccaggttggaagggtggtcagaagggatgagcttacaaacccgggggtgatggaatgtgctgagagaggaaggggagctggggccagccaggggtcagttgggctccaagcactgacctgggaacacggtggagtgaggtggggggtggcttgcaggaagaggctgagtctactggggacctgctgcctgtgaggtacctgggcagcatctgagtggagaccctacccccactatccccagtttatgaccctgacccccgacctctcttttcttccacagattgcagccaaatgtggtctcatcctgtaagtctagaggccataacttccaatctggggagcggggaggagcaacctaaatcatgccctgcatgccttggggggtgtgggaggccagaaactccatccgtcctcagtcccaatccagccagaaactgtccccccactttcccagccaaagagggagaccccaccctctacctccaccaacaaactcggggacttccacacttgcaggcaggtctgtagctggatcccggtccttcctactgcagtgccaggctgtctcccctctgagggtcccctgggtcggaggcagggggctaaccctaagagagaaatcccagaagcctgagcacaaggtggaatttgggtaagggtcactgggcagaaaagtgtttccattaggtcagccctgggtgttctgaaagcaccgttctctgacccctcatactccatgggcgccagcgagaactggctcttcctggacatgccacgtggcctctttccccgcacctccttagagttggatgaggagtgtcatggccgctgcaatgccccttccccacacctgcctgctgaggtcaacaggatacttcttctacccgtgttacagatgaggggcgtggggcccaacagggagccgtactgggcacaagtgcacacgcccttccccagagtcctcctactgagctcagagcgggggccataccccccaccccactaaggggtggcttgtgccatgagcatcttgggtgtattttggggaggctgggatccttctgcctctccattctggtgccagcaacttctccttgcccttttctgtgccctctgaccagtgcctgccccaaaggattcaaatgctgtggtgacagctgctgccaggagaacgagctcttccctggccccgtgaggtgagcccagggccagctcctttgggtgcagtccttggaggggcctggtcctgtgtggacaaggccaggcacctgccgagggggcagtgtgggcggcgggagcggggagatgtagggagtccccagggtggcctggggactcagggtactcttggtggtccccaccccaggatcttcgtcatcatcttcctggtcatcctgtccgtcttttgcatctgtggcctggctaagtgcttctgtcgcaactgcagagagccggagccagacagcccagtggattgccgggggcccctggaactgccctccatcatccccccagagagggtcagagtatccctttctgcgcccccacccccctacagtgaggtgggtgtctcatccccatccccaccttgcctctggccggctgtgcagcagagacagtggagggcccttcgatcctggagggcactctgcacccagcattgggtcacccctctccctggtaaccatgcctcagctgggatgggggagtggtggccagggccagggcccagaagactgaattctctcttttccctgcaggtgattctgaagcccagcctgggcccaactcccacagagccaccccctccctacagcttcaggcctgaagaatataccggggatcagaggggcattgacaacccggccttctgagtcacctcctgcctggaatcttgccatcagcaacctcctccccagtgcctcctggatcaagctagagactgctggcaccccaggaatgtccctgcccatcctgccgtgtctctgttcattcttggatttaacttattactttttctgcttctgtttccaccccagctgcctctcttgtcctgagggttaggctggagtgacagtttccgcccaccccccagcccaagaaagaggctgccggaaagaaaatgctgaccattggaggtgcccaacagtagaatgggctactgtgaggggtagtaagagccccatttctggaggtatgcaaatcttgactggacagccagctctgagattttatcagggcacttctatacctgtgggacattggactggatgagccctgagccagcttccactcctacctgaatagagaactcactgcacccacccacaacacatgataaacacatgtcctcactgaatgttactgattgcggctgagggcctgcctctggctgtgtggggaggtgggtggagaggtgagcccaggcactgctgaggggtgcggtgatggggtcgctgcgccgcaatcccaccactgatgagccacctgggaggtctgggaggacagtccatccatgggccgccctcggagagaggcttgttctagatgtattggctgtctgttttttgatgtctctgtgtgccaaacagcctggaaatggggtacgcgtgtcccttgtgtgggtttcccaatcccttccgcccaaggctttcctgggacacatggagcccagctctctggctgtcttaccatgagaagttggtaagttggctgtgagggggttggatccaggaagcagccctgggacagcccattctgctgttgatagcaggaaaccacctgctgggagacaatgggggtggggaaaagcccaggagagcagtgggtggggctgggcatccgtggagtggggctttaggagaccttgaacggccccaccctggaatctcctacaggaaggtgaggaggtggcaggttccacccttctctaccagccccgctcgctcgtgggagttaaccccctaggggagaagagtcttcactggggttcgacccatgggggcctggcatagtcatgcagaatggggcgggacaatgccaatgccttgggactcagacagggctgagtgcctccaccctgatttttgcctctgcactgcgcccccacagcccactcaatgccagcctccttctccaggcagagagccccatgtcaatgctggccaaagctctcaggaggattggaggtagaactggccctggtatgccaacaggggtgcctcttttagtgctctcccaataatgctcatcctgggggcatcaggacgcaggcaggtggcagagctgggggcagcttgatggcacaggcagccccaaagatgccaggaacagggactgtccgggtgtgggttcccagtgagatagggccctggaaggagtgcagcagttactgacaatatagtgccagggttggccataggagaatgagcccaagcgtaagtggaagtttccctttactttcagggattggtcaggggtggcagaaaacatgtgggttctttgtgtagatgtggctagttccaattagagaagtcctgcagctgatgttgccctcaccgtgatagcaggaggatgttgagaaatgggcttgggagacctggaggagaagttaccctcggcccagacgttgccttcctttcatcacagggcctttaactcctcctagggagtagcagagtggccctagggaaagtggccatcctgaaacctagtgttgctgtgacctggtgacagaaatggaaacctctgtggctcttctggtcatccttggtgggagtgggaatggtgtcacctttctagagggccatctggcaccatgtaatcacgccacagatctttacgaagctcctgctatgtaggaaacactatgcctggcactgggtatccattaaaatgtaaaatgcacgtgacctggcaattccacttctagaaatgagccttcagaagtgctcatacaaaagagctcaataagtatcatgcactaattcattgtgccaccagagctccctatgcagccttttaaaagaataaataggatctgtagcaccaaccctgcaaagcatccatcacttattgttacagagaaaaggcaagttgcggaactgcctatgatctcagtttgtaaggatataacccacacatattttattttatatatgtatattttttctttgcaaatatgtagataagatctagaaggatgtaagtcaatcactcaccacacttccaatagttgttggccccaagagtgggatgtaggtagcaaattgcaagcgggtcttcttcctttgtatgctttggcactgtgtgttttttacaatcagcaagcattgcttttgtaaatttagagatttgtttacgggaaactgtaggcagctttagaagtttatgaagatttgccttgtgaactttgatcaatggcaactgataaattatcagccctggtatgtggaagagaatacaaggactttagactgtggtacccacctgacatggatgtgacccaggggacagacacatgatgggaaagcctggatgcctgccagacatacatgaagcccacatctcagacctatgcaggacttatgaggtgtataatgaatgacagaaacagtgagctggctagttgggtgaatgagcagtttcacagtgacggagaatttcatccctcgtggctggtttagttgctcaaacccaatgagtgaataatgaaagatggaatgaatgaatgaagattaaatgggtgcatgaatgaatgaatgaatgaatgaatgaagagatctgccaccagatatttgtaaagaaacacagtctagttaacatcaaggagatgttcctcgtggctgtgcagttgaatttctatctgcagggactccccagaggacagggaaatgcaggaaaggctgtagggtggggggcatgttgaagcaggaaggccttaaggcacttgctccagggatgcaggaggggaggagaaaggggctgctgctgagggaagtgaggagagggataaacaccagcaggaatcttacctcaccttccagctgagatgcaggactccagcttctgacatttcgccttctgcatccaacatctccaggcgttggtgtgcccatctgtacagtgaagagcgtggccccttctggctctggtaggacgtagctctgaatccaaagttgggaaggggcccaacacggtagctcatgcctgtaatcccagcactttgagaggctgaggtgggtaaatcacttgaggtcaggaattcgagaccagcctggccaacatggtgaaatcctgtctactaaaagcacaaaaattagctgggcgtggtggtgggcacctgtaatcccagctacttgggagggtaaggcacgagaatcgcttgaacctgggtggcggaggttgcagtgagctgagatcacgccactgtactccagcctgggtgacagagcgagactccgtctcaaaacaaataaacaaacaaacaaaaaacaaagttgggaagggccaagtaagaatattcagagaagctccttaacaccaacaggctttcctccactctaccttggccacagtctcaagtggacataccttatcttgtcagctctgatcacctcaagcctcccactctgaacatcacctcctgtacttccagctcaggtaggtcctatgtcaccaccacaccatgccagcaattctctgagcccacccagccctctgaaccagcagtctttgcctgttggcagcgccatcaccatgtccttaaaccatccttacagtcactaccctgcatcctttaccccttttccccattcactgtgctcacccagagaaactccaaactccaaactccagttggatccaactatggctcaagaaccagcacccctgtgtgactagactcatttccaaatcaaaaccacacgtttcgcgcaggccctcggttcctccaatgtgctttcacagcttcacttccccgctcttgaaatgactcatttcaaatctcccacacccccaacctcaatttcagctggcaatgccaccacacgcttcagagaaagaaaggatgcacccacaccagcacacctcacctccatgccccacacttgccacccagtatccacgcgtgcccccttcccccgccagagcacagtggaagctgcatcgtgctcctccagcctgcactgggccccagccctcctgctccttagggcctggccctgcagttgtctctgcagagcctttctccccttcccggatcattatcatccgcttataacatgcccacccttcctcctttagaaactctccctggaggcccccagcccttctggcatctgctgttccacctcccccctccccactttcattctgtgctgctccaagcagccgtttgtccccaccgttacaggagatgactctagtccagatcatcagtgacctacatgtcaccaaggccaaaggtcccttcccctgcctatctctcagtggcatttgacacgcttggccatggcctccttacctgttcttccaatgtctccgactccaccttcccctggtttccctcctccacatggccttctcctcaggagccttcacttccccctcctcctccgccctctctcagtgatggctgccccggaggtctgtcttggggtctccggtcttcatctttgttcattcccatagtggctgtcatcctgatctgcggcttcacagaccatctctggtctgatgaatctcaagacttaatctcccgccgagacttctccctgggactcagattcacatatttaactacctcacgcctcctcttggatgcctaatgagcatctcccagccaaaagcaggctcgaatttccctccaccaccccctcaaatccagtccttcccaaggtctcctatcataaatagatgtcgctccccattcgcccagctgtgtaggctaaaacactaagaaattattgtgatttctttttccctcactccatcatcctgacagcgctgcctgcaaaatagacctaggcccacttattcccatttcacggttacagccctcgaccaagccaccttcatccctagcccagcctatcctaatgaactacctgatttctgcctccaggcttgtctccatctcaccccctgcagtttatcccacacactgcacttagggagatctttctaaagcgcaaacaagacttgttattcccgtgcttaaaatcctccaatgaggcagaggttgcagtgagctgagatcgtgccactgcactccagcctgggtgacacagcgagactccgtctcaaaaaaaaaatcctccaatgggctgggcgccatgtctcactcctgtaataccagcactttgggaggccaaggtgggagggaagatcgattgagcccaggagttcgagaccagcctgggcaacatagagagacctctgtctctacaaaaaaatacaaaaagtatgtttgtattttttggcttcactcatggtggtgtgagtctgtggtcccagctatccgatggcagggcggggtagtgcggaggtggggcagggggagactgaggtgggacgattgcttaagagatcaagaggttgaagctgcagtgagctgtgatcgcaccactgtactccagcctgggtgacagagcgagaccctattcaaaaaaaaattttttttaaagttgcccattggaataaacttcaaacccctgaccgtagctggcaggacttaggcagtgtgtggcccctcccttgccctcaagcgtcttctcctacttctcctcccttctcactgcgtggcagccacagttgccttctctctgggacttgactatcccaaatcttggcctggcccagggcctttggtggcttttctgcttggaacttccctccctcccaatgccctcctcccagtcttcacagggctgctgtattttcaccattcaggttcccagaggggtcagcatatgcaaaggcctgaggagggaaggagcttgggggctggagaaacttaaacgagacccttccttccttcaaaaccccctaagattctgcagggttcggtggcatgtacctgtagtcccagctgctccgcaggatgaagcgggaggatcaagtgagcccaggagttcaaggttgcagtacaccatgactgcacttgtgaacagccactgctcttttaaaaaataaaaaccccttgtcggggcacggtggctcaggcctgtaatcccagcactttgggaggtctaggcgggagggtagcttgagcccagaagttcgagactagcctgggcaacaaagtgaaaccccatctctacaaaaaataaataaaaatgaaataccccaagagtctgaaaagagggttatgtgtttcctcaggctgctgtagcaaagaaccacagagtgggtggcttaaaagagcagaaatttattatctctcagttctggaggccagaagtctgaaatccaagcatggctaaggttgcccttgcctatcttctggcggctgtggcccttagcttatggctgccctccagactctgcctctacagcacagagcattccctccctccctcccttccttccttcattccttacttccttccttccttcccctccctcccttccctttcttcctctctccctttctctctctcttttcttttttcttcctttctttctttttttctttctttgtctttctttctctttgtttctttttctttccttccttccttctttcttttttcagagacagggtctcgctctgtcacccaggctggagtacagtggggtgattatagctcactgcagcctggaactcctgggcttgagcaatcctcctgcctcagcctcccgaagcactgggattacaggtgcaagccatcatgcctagcctatcattttcttctgtgtctatgcgtgtcccccttttctgtctctgataagaacactcttcgttggatttggacttcaccctaaactagaatgatctcatctcaagatccttatcttaattacacttgaaaagacccttatttcaaataaggtcacactcgtaggttttggctgaagatacataatttaacccacgagggaggatatatttctaggcatttaatctgggtgggatccctgaggcaggaggacctcagaggtcacctgaaaaagcatatctctaagcatattccctgaaaaactagttccaagtgattttttttctagaggatttttttaagggtggggggagcattctgtgttcagataaatttggaaaatgctgcgtatacctcccacactagaagattcacagttcaccttagtgtattaaagggctgagaattcacggtaaagaagcattatgtatttatggaaagcatcatttccctagtttatttcaccataaaaccccattttctttctcataatctccgtagcattttcagatcatatcagcctgtggaaattcaagaggaatgttgatgtgagccaaccttgtcttactttagctgagaagatcaacatccagaaaaggacaaatgacttatccaaggtcacactgctgagagggtcggaagttgatttaaaactcagcctcctcaaaatgatagcgatggagacacattagttgttgatggggagagagtgggtatggctacacagaggtctcaccagagagatctgtttggtgggggagcagttctgcattttacttgaagaggtagtagttacacaaatttgcatgtgataaaacaacacagaattaggcacacacattatacccacgtcagtttcctggctttgatactttacataagatgtaacccttggagggcctggcacggtggcttacccctgtaatcccagcactttcggaggctgaggtgggcagatcacctgaggtcaggagtttgagaccagcctggccaacatagtgagaccccgtctctactaaacatacaaaaattagccaggagtggtggcacgcacctgtgccagctactccagagggtgaagcaagagaattgctgaaacccaggaggcggagtttgcagtgagctgagatcacaccactgcattctagcctcggggacaagaatgaaactccatctcaaaaaaaaaaaaaaaaaaaagagatgtaaccctgtaacccttggaggtcaggtgcctcctgcctgtaatcccagtgctttcggaggctgaagcaggagggttgcttgagcccaggagttcaagacaagtctgcgcaatatagtgaaaccccgtctctataaaaaattagccaggcatggtggcacatacctgtagtcccagctcaggggctgggactatgggactacttgggaggctgaggtgggaggatcgctgaagctcaggagtttgaggttgcagtgaactatggtcatgccactgcacagcagcctgggcaacagagcaaggacctgtctggaaaaaaaaattgagagaaatttggcaaagaaaattgggaccactttgtactatctttgcaacttcctgtgaatctataataatttcaaaataaaaagtatgaaaaactggtttcctgtctccaggttccagagcttttaacactgtcaaaggtcattagatcaaatttaggtttatgctctgctattcatatgcttctagtacccaataaaaagcactgtttatgggctgggtgcagtggctcatgcctgtaatcccagcgctttgggaggttgaggcaggcagattacctaaggccaggattttgagaccggcctggccaacatggtgaaaccccatctgtactaaaaatagaaaaattagctaggcatggtggcacacacctgtagccccagctacttgggaggctgaggcagaaggatcacttgagcctgggaggtcgagactgcagtgagctgcgatcactttggaggctcaagaagacaattttgtgttttgacacagcaatagcagaactttcatcaacaattagattcagaacaggttatactgcacacatttttgccacatgcccagccatctggcttctcttggaattgtctccatctgcccccacccccaccctcattcacataatgactgtggaactgggggcagccatttgatcctacttctctggctacggttgactggttcaggggtgggcactgatccaatctgggccaatcagagcccttccctgagaattttctatttggagctcagggaatctgtccgatcctagattgctcaggtagtaaaagtgtgagatggagatggggccactggtggccatgttagccccttatgtgaaaaaacctggttgagtgagaaggaatgaagccaacattcaaaggaaagtaaagacaggagacagagagaaagtcctgttaaccttgcgatgcctgtttctgtttgtttctgaaatccagctgccttactatggcctagctactcctcccttccttggcaaccaaaaagctaacacatctctcatttgggctggggggtgttgttttgttttgttttgtcttagttttcattgtttcagacaaggtctttctctgtcacccaggctggagtgcagtggtgtgaacacagctcactgcagcctcgacctcccaggctcaagtgaacctcctgcctcagcctcagcctccccagtagctgggatgacagacacatgccatcaagcctggctaatttttaaaattttttgtagagatgaggtctcactacgttgctgactggcctagaactcctgggctcaagcaatcctccttcctcaccttcccaaagtgctgggattacaggtgtgagccacagcacccagtgacatctcttattttgctcaagctagtttgagttggtttatcatcacttgcaatccaaagagcctaaagtagcctatagaccaactccctcattttacagatgaagaaatggatcctgagaaagtccatgacatccctaaggctgaggtcagtgagtagctaggctagaattaaattgcaaacatcttgatgggaacactcatttgtttttgcacagccgctcctcctgccacgccatgtgacatttccaaagcctgccaagatttccaaagtcctcagttggagggaaatgcacctaaacctcctcttatccacaaaacaaaggggaaaggataaaaatagaagacccctgaaatataactggagatctgggacctgggggattggcgcaggaagctgagaatggagagaacaaagtcagagttgttagaggtgaaaactgaaaggaccctacactctatttgtggctgagctctcacacaaggaagacaggatcaaaggaggtcttcatctctttgcaaaactctcatgcaggattcagattaaactgagccaacaaatatcctcctaaccgaggctaaaaagagatcagagacccactccagtgttggccacctgtgaatccccaaaactcccagccttccgaggtcacccttacctttaatataaagttgggtagctcaagggaggatccagatgcttttcctgcgtggttgcacagctccttgccagtccccttggctcctacagctgacattctcctcctatccccccaccccagcctagacacagcattcttcctgctccacccacccctgacaagcactgctaatcaagctgctgtgtggatctgacttttcctgaagtttcaggctaacagagaggggcgtgatgggccctggcaggttttcaggagttttagttcctcctgggccacgtaatatatgaggctaacagagtgagcctgaatcagactggtccttgctaaacagatgactcaacatcctggaaatgtgtagcaagatggtgtctggagccagccaagaacttgtccccagaaccacagtgtttgttagttcccagtggcttgctagaggcaggttttacaaccccatgaggcacttacgctggggtttcaggaagaagtgggtgaggggcaagtggcttggtgagcctcgctttgaactacctaagacttgccagatcttcatccaggacaggcagaagcttttggcccccactcccaggaaccctcctgggggagcccagagagccacaatcgctgacatcatccagcccgttgccctctagtgtcccctgaacctccacagccaaatggtatttcattaaggatcctggggcagagggcagcttctaggcagcttcaaaccccatcctctgcagaacctgccgagaaggtaacatctcaaaacacatacgtggtgtgtgctgcttatccctgaccccgctcgggtatcctcacctgatgcttccctggccctgcctgtggctagggttcccatcctctccttatgtccccaaaacaacgccaaacagcctgcagcccactctgaagagcagtttaatgctttttatctaagactttccatttttaggaggtctggccttccatgaacaaacacgtttatcaagatgctttttctaacccaaagagtaattggctctctaaaagcaattctgtttgattctggaccaacaattgcaaattcacaaaccctagcaaaagatattaaatagtgagaaatattctccaaaacatgaacctgattcatacatataattactgtagttctcatatcctagaaaatccaggatgtactgttgccaaatctattttccttatatgtaccacttacattgaaatggatcccttccttgacttttttacctggaaagcatcagagttcttcagagtagcttctcagagtctcagttataggacaagccctggggagtctttaaaatcctaggaataagccatgataactagaggagtttaatttcacgaatttttttttctctctcttttttttttttttggcagggtcttgctttgtcgctcagtctggagtgcagtggtgcaatcatggcttactgcagccttgacctcctgggctcaagaaatcctcccgcctcagcctcccagttagctagaactacaggcacacgccaccattcctggctagttttctgtttgtttggttttgttttttgttttttgtagagacagtgtcttgctctgttgcccagggtgctcctgaactcctgggctccagtgatccttccacctcagcctcccaaagtgctggaattacaggcatgagccaccgcacccaggtaatcctaagaattcctagcagcccctctgacaattagctgctccaaacagcttcctcagagacagcctgagccagtgcctcctcccaggaggttgaaccctctggacacaaacccagtgacccaccaccattcctttacacagtgtccctcctttttagctcccatttggttcctgttccaccaggccctctataaaggatgcacagggctcgtggaggactccagctcaacttccctgggagctttactaagatttcaacattttacacctttggccggcagtggtggttcacatctgtaatcccagcactttgggaggctgagttgggaggatcacttgggcccacgagttcgaggctagcctgggcaacatggtgaaatcccgtctctaccaaaaattaaaaaaaaaaaaagaattagacaagtgtggtggcgcacacctgtagtcccagctactagggaggctgaggtgggaggatcgcttgaacctgggaggtggaggttgcagtgagccaagattgcagcagtgcactccagcctgggggacagagcaagaccatgtctcaaaacaaacaaaaaaaatttacacctttgatggaaaagagtcttaaagcttaattgctgggctgggcatggtggttcacatctataatcccaacactttgggaggctgaggtgagagaatcacttgaggccaggggtttgagaccagcctggggaacatagtgagaccctctactcctagctatttgggagactgagtcaggaggagcatttgagcattgcactgcattccagcctgggtgagagaaggagacctcatctcttgagaaaaaaaaaaaacaaaaaaagctgaattcctgtagccagcatacactattttcataaccctccctgcagttctagagtgtggctcgagggcacagtctaaatgtgaggtccatgggccccaatagcttcctggatagaattcagggagctatgaactgaaatggaaaaaacattacatcttgattttcacaaacctctaactgaaatttatcatttccttcagtatgagggtaagcaacaagccacagcaatgttaacagtgcctgtggatttatcacacagaaaccacagatactttaaacaattgtttatgttattatttattagagatgaggttttgctctgtcactcaggctggagtatggcggtgtgatcatagctcactgccgcctcaaactcctgggctcaagtgatcctcccacttcagcctcttgagtagctgggattatatataggtgcaaatcactatacccagcaaaaccacagattttttttgtcaccttatagttgttgcaagtgtcttaaaatattattcacactccaaactcgactgggtgcggtggctcacacctgtaatcccagcactttgggaggccaaggcgggcagattggttgaggtcaggagttagagaccagcctggccaacatggcgaaacccagtctctattaaaaatacaaaaattagctcggtgtggtggcgggcacctgtaaccccagctactctggaggctgaggcatgagaatcgctcgaacccgggaggtggagtttgcagtgagccaagattgtgccactgcactccaacctggggataaagcgagactctgtctccaaaataaataaataaaaatgtgtttaggcattattttgagaaggggtccataggtttcaccagcttgccaaaggagtccagggcaaaataaataaataaaaatttaaaaaattaagtattcttgtaatctggggagaggctccaggcataagaatattatgaggaggaaatccactttttttttttttcaaggaaagcaaggctgaaggagtaaaaaagatgcaattacatgctgcctacaagagacttgctccacctttaaagagacacatagactgaaagttaagggatagaaaagatattccatgcaaataaaagccaaaagagggcaggaatagctagacttataacagatgaaatcgattttaagtcaaaaatggtaaaaggtgacaagaaggtcattatatgatgataagagtcaattcatcaagaggctataacaattgtaaattatatgcacccaacatcacattacctagatatataaggcaaatattaatagatcttaagggagggatagactaatacaataatagcaaaggactttaacacctcactttcagcaacagacagatggatggtccaggcagataatcaataagaaaacattagactgaaactacactttagaccaaacagacctaacagacaaatacagaacattccatccgacagcagcagaatgcacattcttctcaagagcacatagaacattctccaggatagattacacgttaggcacatgacatgtcttatcaaacttaagattaatatcatatcaagtatcttctcaaccacaatggtatgaagctagaaatcaataacgagagaaatttcaggaaattcacaaatatatggaaattatacaacatgatcctgaaccaccaatgggttaaagaagaaatgcaaaaatatcttgagacaaatgaaatggacccaccagatactaaaacttatgggatgcggcaaaagcagttctaagagagaagtttatagctataaatgcctatatcgcaaaagaagaaggatcacaaataaacatcgtaacatcacgcttcaagaaactagaaaactagaaaatgaaaaacaggccaggcacagtggctcgtgcctgcaatcatgccactacactccagccctggctacagagcacgagattccctctcaaacaaaagaaaagaaaaaaacagaaacaaacggaagcagaaggaagtaaataataaagatcagagcagaaataaagactagaaaagatcaatgaaactgagttggttttgttttctgtgacagagtctcaaaaaaaagagtgcagtggtacaatttcagctcactgcaacctccgccttctgggttcaagggattttcctgcctcagcctcctaagtagctgggattacaggcacctgtcactatgtccagctaatttttgtatttttagtagagacaaggtgtcgccatgctggccaggctggtctcaaactcctgacctcaagtgatctgcccaccttggcctctcaaagtgctgggattacaggcgtgagccaccggggcctggccaagttgcgtgtttgaaacagtaaacaaaatggacacattctaagctagactaactaaggaaagcaaaagtgatttgtctgggagaggcattggtttgtgcgaccagacctctgcattataatgcagagggccctggaagtctaagcattcctaaggagttgtgacgagcctgtctttccatgtgcctgccacctgtcctgcctgggtccatcatgtatctgtcagcggactcaccttgtgccttcacattcccatggcatgtctgggacatcctgtcacttagtctatgtgtgtctacatgtgccattacatgttcccctcaaagctctgctgtgtttctgtccagtgcctgccacatgtcccccacatgtcagctgtatgttcacgtatgaattccacgtgtattttatttatccatggggtaatattgctgtcataggtcctgcatattttgacatgtaaccgtcaagttaactcatgtatccattcattcattcatttattattgagttcctagtatgtggcactgttttaggctctgtggatacaacagtgaataaaacagaaaaaaaaatactgtcttcacagagcctgcattcaagacaataaatataataacaataacaatatagtagaggccagtaatcccacactttgggaggctaaggtaggcagattgcttgagttcaggagtttgaggccagcctgggcaacctggcaaaaccctgtctctaccaaaaatacaaaaaagtaaccgggcatggtggggtgcgtctgtggtcccagctacttgggaggctgaggtggtacgatcacttgaacctgggaggtagaggtttcagtgagccgagatcatgccactgcattccagcttggatgacagagtgagacttctgtctcaaaacaaaacgaaacaatatagtaaacatagaaataaattaacaagcataataaacaaattatatagtatgtcagaaggtgatgagtgccacagaaaaaaatgggggaaaacaagggagatcagaggtgcgggaaatatattacagtgcccttgtgaaaatttaaaagaaacaaaaagagtagcaggcagagtggatacagttgtaaacaggaggtcagggtagtccccttgaaaagttagttgtctgagagaagacttgaaggcagtagatgaagtgacccttgaagatatggaggaaacacatctaggcagagcaacagcagctatggaagccagaggcagcagcttgtctggtatgttggaagaatgtggaagccagtgtggctggagtggagtaaattgtaagaagtcaaacagggcctggtgcggtggctcacacctgtaatcccagcactttgggaggctgaggtgaatggattgcttgagcccaggagttcaagaccagcttggacaacatagtgaaacgtcaactctacaaaaaatagaaaaattagccagtatggtggcgtgcacctgtagtcccagctactcaagaggctgaggtgggaggattgcttgaacctagaaggcagaggttgcagtgagccaagaacacaccaccgcactccagcctgggcaacagagtgaaaccctgtccaaaaacaagtaaattaaagaagacaaacaggacttgaatcagtttatcttggcctcaatgaatttcaagtttccagttttcctccacctttaatatggtttagcataaacccgtctgtggacaactgtcctggaaactattgaccactgtggtctcaggccattttcaactactctgagtttaatctcaagaaaaacaaaaacaaacccatctcaatgtaaataggagtagggcagctgggtcagaaaatgaaaattttctcccaggggagggagaagggtaggggaaagaattcaggcttagagtcccagctctgccactcaacaagctgagtgacagtggtcactgtgccagcctcactgaatctctttccatgtatggaaaatgaggtgagacccccacagggatgtgagcatagaatgcaaaataaacattcagcccccagcccaagtctgactctcaggacagctcagtctgcagccactgcctcccttcttgggcctgaatgcccagtgtacttcccctttgaccttcattgtcttgaaactatacatttagcacctgagagtcagctcaggtggcaggtaaaatctttgcatagtttctgatgtaatttttttttttgagacagagtcccgctatgtcaccaggctggagtgcaatggcatgatctcagctcactgcaacctccacctcctgggttcaagtgattctcctgcctcagcctcccgagtagttgggactacaggcgtgcgccaccaagcccagctaatttttgtatttttagtagagacagggtttcaccatgttggccagggtggtctcgatctcttgacctcatgttccacccccctcagcctctcaaagtgttgagattacaggcgtgagccaccatgcttggcctctgatgtattttttatcctgaattctcccatatagcatagggcttcaattcttggggagaaaaaagctggagttgaaatcctaaagaaataagaatgtgaatctgaattggtatggttcatcttgtaactgatttaatggacactggaaacgtttacaagtgcctacctgtcacccggagtcggtgggtggccgccctctgggactccttgtcttctgctgccatcgcctggaggcaagagggactgcagggacacagagggacagaggcccacacaggtgggagcagcaggggctcagccccctggggcaactaaggccaccctggggaggccagtggctcacctctcatgaaaaggcaggtggagtgacttgaaaggctggtttcctggctgagcatggtggatcacgcctgtaatcccaagcactttgggggaatgaggtgggaggatcgcttgagcccagtagttgaccagcctgggcaacaaagcaagccccccatctctactaaaaattagccaggcatagtggtgtgtgcctttgatcctagctatgtgaaaggctgaggcaggaggatcgcttgtgtccaggaggttgaggttgcagagctgtgtttgagccactgcattctagcctgggtgacatcgagaccctgtctcaaaaaaaaaaaaaaaaagaaaaaaagaaaagctggtttcctggcacattagtggccaagaaggctcaatgacaaagcggggagttttaacgactacagctctagtctcaccttctacaaaagaggaaactaagagccctgcactgtggtggagtgtttttcccaaggcagagctacactgcttcccaaggcaggatgtggcttagggacaaagtcacattcgaaggcaggccccgaggcctgattccagggttgctttatagcaccgctcaaaagtgttgtccttggaccagcagcctcaggtcagctgggagcttgttagaaatacaggattgcagaccccgctggcaacctacggacccagactccgcactttaccagatcccccaggaaatccggacgccagtcagagccagtgcgagggactggtttagaacacactgcctctcaatgtttttaggagggcacatgaagatagttttatttccccaagtggaaatcacagtattgtttattcctttttttttttttttttttgagatggagctctgttgcccagggtggattgcagtggtgcaatctctgcttactgcaacctccatctcccaggttcaagggattatcttgcctcagcctcccaagcagctgggaatacaggcacccgccaccacacctggctaatttttttttttttaagtagagacgaggtttcaccatgttggccaggctggtcttgaactcctgacctcaggtgatttgcccacctcagcctcccaaagtgctgggattacaggtgtgagccactgcccctggccagcattgtttattcttggttatagtagttctgcatgctcactataaaaaaatcagacaatataggataatttaaagaagaaagcaataaatattgtgttgtgtaaatatccttctggacattttctatacacacacacttcttttttttttttttagatggagtctcgctctgttgcccaggctggaatgcagtggggtgatctcagctcactgcaacttctgcttcctgagttcaagcaagtctcctgcctcacccttccaagtagctgggattacaggcatgcaccaccacacccggctaatttttgtatttttagtagagacggggtttctccatgttggccaggctggtcttgaactcctgacttcagatgatctgcccaccttggcctcccaaagtactaggattacaagtgtgagccaccgtgcctggcccacaacatttttacaaaaatcagattatgtgtgtatcctccatattgtcttgtcgccttttctttctcttcttttttttttctgagacaggatcttgctctgttgcccaggctggagcgcagtggcatgatcacagctcactgcagattcaacctcctgggctcaagcaatcctatctcagggtcccgagtagcggggactaccagggtgtgtgtgtgtgtacatatatatattatatgtatacatgtgtgtacatatacacacacatataaatatatatacatatatagattgtatatatatatttttttattttgtagagatgagggtctcactatgttgtctaggttagtcttgaacccctgggctcaagtgatcctcccaccttcacctcccaaagtgatgggatttctggcatgagccaccacacctggccagccttggatatgatttctcttttttttttttttttttttgagacggagtctttgctctgtcgctcaggctggagtgcagtgctgcaatcttgtctcactgcaacctccgctccctgggtcaagtgattctcctgcctcagcctcctgagtagctgggatcataggtgcaccacaacacgcctggctaatttgttttgtttgtttgttttgtttttgtttttgtatttttagtagagactcatgcaactgcagctgcttgggtcactcaggagccctcatgaccatcacccaccccttttccctgcctggaattctcctctgctcacccactccacccctccctccaccctcacccagtaattcctatctgcgtttaggcttggcctgaaatgtcagctcctggggaggcctgggaacactgaggctggatccccttggcattcactcctctagtgccctttcttttctcctttggagacatttatcacaaattcatgaagtttccacttgaataagaatttgtttatgtctttcttgtccttgaaagcagggcgtgtgtgtctctgggcttagggacccctctgtgcctcacactttgtacagggcctggcacatagcagatgctcagaacatgcttgtgacaggatgaaatgaaggggtggatgttgcgggtcctcagtgcacactcggcttgggtttctacttgatcgtgtcaatcaagctcagattcagagctgctagggaactgaaggtctctttgggggcactgcctctcagcaacactattgcacagagggattttctgattacagcaccagaaagagctcaccccaggtctggtacacagaaagcactctgcaggccaggtgtgttgactcatgcttgtaatcccagcactttggggagttgaggtgggcagatcacctgaggtcaggagtttgagaccagcctggccaacatggtgaaatctcctctctacttaaatacaaaaaattaaccaggtgtggtggcatgtgcctgtagtcccacctgctcgggaggctgaggcaggagaattgcttcaacctgggaggcagaagttgcagtgaaccgagatcactccactccactccagcctgggcaacagagcaagactctgtctcaaaaaaaaaaaagaagaaagaaagagagagagggaaagaaagaaaggaaggaaggaaggaaggaaggaaggaaggaaggaaggaaggaaggaaggaaggaaggaaagaaggaaggaaggaaaggaaggaaagaaggaaggaaggaaggaaggaaggaaggaaggaagggaaggaaggaaggaaagaggaaaagaaaaaagaaagcactgtctggaatagcagctccttggtggtggtgtggaggctggcacgggtgtgcccccacttgctccagcttgtaacaccctcaagtttccatgtgtctttgcctctttccagacaggccacactgaacagcatataacagcacatattccaaacacaagcagggaggtggtgctgtagggtgacttcatggtttattaaacatggacagagaactactaatgtgccaggtactgttctgaccctaggtccacagagatggtgaagacagaaactctatcacagtcgctcacagcctagaagcaaggagaccagtcagtacaatgcagtggaatgcatgtcatggtagcggtgagttcaatgccaggagtagggggaccacagaggcagtgagtgcctctgtagtgagcagaggccacacccttccaatgttttttgttgtcgttgttttgttgtttttgagacagagtctcattctcttacccaggctgctggaatgcagtggtgacatctccgctcactgcaacctccacctcctaagttcaagcaattctcatgcctcagcctcttgagtagctgggattacaggtgtgtgccaccacagtcagctaatttttatatttttagcagaaacagtgtttcaccatgttggccaggctggtctcgaactcctgaccttgggtgatttgcccaccttggcctcccaaagtgttgggattacaggcgtgagccactgcgcccggccagccctcttaaaatccatccaaacgttcccatatctcttgaaataaaataatttttaaaaaggtatccaaggtctgggatggtctggcctctcccaacacccacaccctcacctcccagccttgtcctctcgctctctgtatccagccacatcatcattttctcagccccttccatgtgccaagctctgtcccacctggaggtcctcacagatactggttcctctggctggaacccttcccatgagcacatttttgtgactgggcacgggcatacacgaggctactgaacaaactgctttacttcagccttcagttctgttcccagtgccccgtgaagggtaggccctcaataaatatttgctgagcagactaccttttattcctcacattcatggcaaacagtttccctagattatggcttgcccttaaatttattgtttctttaaccttcagaagttttacattttgatgtcgtcagatcatccaatctctcttttggggtttctctgttgctttacacacagaaagtttcagaggtttcataacggctagtgccttgagcaagggcccaagtttgagggatttgaatcagaaggaacaggaagctgataaccttggtagaagctgatggagggagttgtgtggcaataccaggtgcaatggcgatatggggttagcatgtcttgggtgtggcgttcttggtctagcattttcctcacggtgctcaccaactccttaatgggtctggaaagtattaacaccctggtatgtgttaaggaaaagcaaatcagagcccactgtttgctaggcattgtgttaagcactggggaactgactttttttttttttttttttgagacagggtccttcctctgtcacccaggctggagtgcagtggcccaatcatagctcagtgtagcctccaactcctgggctcaagcaatcctcccactttagccttccaggtagccaggactacaggtgtgtgccacctggctaattttttaattttttacagaggtggaatcttgctatgttgcccaggctggggaactgactttaaaggtaagaatcaaagaatagagcagtagtttattatgtgcaggctgtgtgtgtgtgtgtgtgtgtgtgtgtgtgtgtgtgtgtataaatgtgtctgttagggattccagacagagggaaaaatatctgtgaggagtccaaggtggaatataatcagacggtcctcattaaatcccaaaggaggctgcaatcgccagctctctcattcaaaactcaaagagaggttttgagggaaggcaaggagaggacgttattgaccatgatgtgtggccacattcttgagggtctcagcccagccccagttgccttagaggacaggaccaggctgcttttagactacagccgccatgactctccacacgctgcggcaagagttaaggcaaagccgatagtacaacacagcagttgtcccaggtgaagcccttgtcaacaggcgtcctgcggctttgtgactgattgttctatccttggctcggagaaggggcagccatttgatgttcaaaaatacctgtaagcggctgagcttagtggctcctgcctgtaatcccagcactttgggaggctgaagctggcggatcacctgaggccaggagtttgagaccggcctggccaacatggcgaaatcctgtctctatcaaaaatgtaaaaattagccgggtgtggtggtgcactactataatcccagctacacaggaggcctaggcaggaaaatcacttgaacttgggcggcaaagtttccagtgagccgagatcaagccactgcactccagcctggatgacagagtgacaccctgtctcaaaacaacaacaaggaaaaaaccctgtaacctacagccatttaggtgtagggtagagcatttaacctcatggggtggataaatcaatcaaagtgctgttcaggcctccccagtccttagtccagcaaggtgacgttggcagagggtctctcactgcccgggggagacaagtgagaataaacgacaacacaatgactcccaactgtgggcatttaagcgggagccaggccttgtgctgaacaagcagttcccttgtgtataaccttagatggtgggtgtggctctttattttctttttttacaactttttttaaaatcttttttttaatctttttttttttttttttttttttttctgaaatagtctcgctctgtagccctggctggactgcagtggcgctatctcggctcactgcaacctccgcctcctgggttcagcaattctcctgcctcagcctcctgagtagtttgaactacaggtgcccgccaccatgtccagctaatttttgtatttttattagagatggggtttcatcatattggtcaggctggtctcaaactcctgaccttgtgatctgcccacctcagcctcccaaagtgctgggattacaggcatgagccaccgcacccagcctccaaaaaattatgttttttgaatcataaggcgtgactcttattcccactttacagataagaatgggatgcttagagaggtttgccccgagttgcttagctataactgcaaaagtccaggattcagacccagattgcctgcctctgtggccatgcgaggaactgtaatgccctgtggtctcccagatcgtggtgaaggaaggaacatgtctgaggaccagaagtggacacacacgaggcaagattgggaactcaatgtcagatatctctcggggaagaacatgacttctgagactttgactcagaaaaggatgggcttcatggggatgctgggatgccactctgcaggcatttcttataaatatctcctctgtcctgttgcagggctggaagagaacgatttcagtagcattagggctgtgtaggctgcaaatgaatagcaggagctggctagccacatacggacaaaagtggggaaacactggcatagtggctgttaagaaatatgggaagaaggctgatgttacatgctgtcacacacaatgtcacatgctgttatatgtgatgttacatgcagttacatgcaacattacgtacaatgttccatgctgatgttacataatgttacatcatcttacatgcactgttacatgctgatgttacatagtattatgtgcatggttacatggtgatgttacatattacatgctgttacatgagaggaagtctgttgggctgtctgctgtgtgacagctggcagagggaggctgtccccaaggagtatacagggcaaggtgcccaactaggctgagagaggcatgggcatccagtcctcacaaagaacagagaggggccacctccccttgcggcaggccccgggctgcctgcctggaggaggggaaccccaaaacgtgggctggagacaagtgagtgggaaaggaatgtggtgaagcactcagctagcgatctgggaacagtggcgagcgccacagactcattcactgaactgtgagactccaggaagcctttgtgtgtctctgtgcctgtgtgtttataaacttcttcccttccaagttggaatcaagacttatttggcaaagaatgttgtccttggggagggagactgcccagaggtggaaaacatgtagatgaattcgtttcttagagttctagatatggcttatctgtccaaggctctggcatttttctaagataaataattggattgttcaaactgtgaaaatgaacatagtgaaaactttggaaaactcttagtgtatgaatctggggggtctgtactgatttgaagtgtgacaaaattggggcttccatcattttttctgtgtgttgagcggtttttttgtttgtttgtttgttttgtttttgagatggagtcttgctcctgtctcccaagctggagtgcagtggcctgatcttggctcactgtaacctctgcctcttgggttcaagcaattctcctgcctcagcctcctgagtagctgggattataggtgcctgccaccacagctggctaattttagtacttttagtagagaaagggtttcaccatgttggcctgtctggtagagacagggtttcaccatgttggccaagctggtctcaaactcctgacctcaagtgatccaccctccttggcctcccaaagtgctgggattacaggcgtgagccactgcgcctggactgaatggttttttttgaagaaaatacagttgtaccccgcactataattttttattggatgagactagaaatatgaccttatattgttagctttgttttaattaattggtagactcttttgagagtagttttaggcttatggaaacattgagtgggaagtacagacagtccctcatatttctctatcccctatgcccacagtttctcctatattaatatcttgcattagggtggtgtatttgttacaactgagccaatgttgatgcattattattaatcaaagtctatcatttacttgagggttcactcttcacattgtacattctatagctttcgacaaacataatgatatgtatccaccattatggtatcatatagaatagtttcactgccctaaacattccctgtgccacacctgttattaatagctttttcaaaggaagatttagatttcagtgtttttcccttccactttcttttagaaagtagaaattctgttgcatccttcccagtcacatttctaccttgctcggcactgctctcccacacacacattctaagaagctggtcaaaataattcctcactgtcaacctccaaagggatggccaggagatgctcagcacctcaatttgacatgacaggccctttaggagttgagatgtttacatgactgtcccctgacattgtaatgggaggtcgcttcccatggtcccagctcaggagtcccgggtggttttcattccactcatccacatacgggtattgctctcagtcagaagcaacagaaacccaactcaggccgggtgcggtggctcacacctgtaatcccagcacttcgggaggctgaggcaggcagatcacgaggtcaggagtttgagaccagcctggccaacatggtgaaaccctgtctctactaaagacacaaaaaattagctgggtgtggtggtgcatgcctgtaatcccagctacttgggaggctgaggcaggagaactgcttgaacccgggaggcagaggttgcagtgagccaagactgagtcactgcactccaacctgggcaacagagtgagactccatcaaaaaaaaaaaaaagaaacccaactcagactaacttagtcagcaggagaaatttaaataccataacaaagacaccactcagaactggccctgcacaaggtaaagtctccatggtgtctagtggggctgggttagcatcaatctccaaaggaccccttgatctttttttttttttttttaataaagcctgggtctcactctcgctttgttgcctgggctggtctcgaactcctgggctcaagccatcatgctgcttcagctccccaaagtgctgggattgggtctttgtatcttgatgagatgatagagatgacaatgacttttatcttttttgtttgttttgagacaggttcttgctctgtcacccaggatggagtgcagtggtgccatcacggctcactgcagctttgacttcctgggctcaggccatcctcccacctcagcctctggagtagctgggaccacaggcacatgccaccatgcccagctaatttttgtatttttggtagagatgggggggggggggtctcacaatgttgcccaggctggtcttgaactcgtgagctcaagcagtccacctgcctcagcctccctgagtgctaggatttcaggtgtgagccaccgcatctggcccttttatttgtttcattgtgccagggcctttaatctctttcattgtttgaggggattggtcttaatctaggagggctgcatatctccccaggtgcacaaatacaaagtcaggttatttccttctcctctggccttttgtgcctttccttgttaaaggtccagttcacttacctcatctttgtgaagttgcccaactcgggcagttgagttgacttgtaaagagggtgagtttgacccccacacttgccgcagggagacggttagctgcctctcaatcctgccaggctagttcttcccctctgtggctggaaacccaggcaggcccctgacaactctggccatcttttctccagtcccttcaggtcacagaacagtgtcaatttagtcattaaaaggtctgattctgcaaaagagtgaaaacatcaattccccttgcagagagatgtaggagaccagaatatgccaccccaaactgtgcccctttggcacaaggattattttgagtttaagacaattgagatgaagcagatataaggaggcctctgctctcccgctatttgcctaaaagtaggacataaacttacaaaggtgccctccccccatctaccaggaaggacaaagtttggccaccagagacagctttagacccttatcagcaacagaacaatctccataacaaaccttacaagctagcctctatatacaatttatttgtgttctcacaatctgccacccctagagattccaagtcctttcccctggtcttgttatttgtctaaaaatttattgtggctgggtgtggtggctcatgcctgtaatcccagcactttgggaggccgaggtgggtggatcacttgaggtcaggagttaaagaccagcctggccaacatgggaaacctcgtctctactaaaaatacaaaaattagccgggtgtgatgatgggcacctgtagtcccagctactctggaggctgaggcacaagaatcgcttgaacctgggaggcagaggctacagcgagctgagatcatgtcatggcactccagcctgagcaacagagcgagacaccatctcaaaataataataataaataaaaataaaaaataaaataaaataaaaaatgtactgttctttgttgaagatgctgaaagtcccttctgtgggatttactcattccctgggcatttcccatgtttatctgaaatatgcatgttaataacctcctattttttttctcttgttaatctgtcttttggcataggagccccagctagtaaacctaaggtgagtagaaggaaaaattatttttttcctcccctacaaacacttctgtccaagttaggacccgtgtcagggagaagccggtgtctggagagaagcagggccatcagttttgcttgctttctgctcagtggttggacagaaaagtgccaccccctactcctccaagcaaggacttatcccagctccaggaggccaggagggctgacatcttcttcagggttcgcctcagctgcaaagtgctgcctcacccaagagcatgccttttgttttctgggggggtccatgtacaatgactgatagaggtaggggttgaagagctggccatttaagttattaaaataattatctgagaggctattaggctggaacagttccagtgccttggttttctacataagcaaactgaaacccaactcaacataaactcaagcttaaacaatcagtaactgccaactaacctcaaactagagtttttaccaattaaaaagcactgactaaattctaactagggacttcctactttaaccaatggaaaatgttatttgtctttgccttcattaacatttctctactcttctgggactgtcctgcccaagcaaatggtttgactgttcactgcagaatttccagaaagaccttatcagctcttcaatggaaagcatcaaatgttacttgctatttgtcttatttgttcattgttattaacaaataacaatgttatttgttatttgtcttatttatctttctgcagccacattataaaagtctcctttcctgcctgctctggggagcactgaaccactggtggtctggtgctgcctaattcatgaattgttgaatggtcaaataaactcatttaaaaaaaatatttttttgagacggagtctcgctctgtcacccaggctggagtgcagtgacgtgatctcagctcactgaaacctctgcctcccaggttcaagggattctcctgtctaagcttcttgagtagctgggattacaggcatgctccaccatgcccagctaattttttttttttttttttcttgagacagagtctcactcttttgcccgggccggactgcagtggtgcaatctcggctcacttcaagctccgccttccgggttcacactattctcctgcctcagcctcctgagtagctgtgactacaggtgcccaccaccacgcctggctaattttttgtatttttagtactgacagggtttcaccatgttagccaggatggtcttgatctcctgacctcttgatctgcccgcctcggcctcccaaagtgctgggattataggtgtgagccaccgcacctggcatttttttgtatttttaatagaaatggggtttcaccatgttggccaggctggtctcgaactcctgacctcaggtgacctcaggtgatccacccacctcggcctcccaaagtgctgggatttcaggtgtgagccactgcacctggcctcattaacattttaatatgccagagtttatcctttaactaggctccccacaagccatcacacctcaccttgcccctgcccacacctgctcagtcctcttcccttactcaggtattgtttcctaagaaataagcctcctgaaggccaaactccacctctgcatctgcttccagagaagcccacctgtgaagccctcccagcctttcactcctctccgtttctgttaacagaggattctgactcatccagggctgaagttcaaggacagagatgatagaaagagaggcaggaaagctcttatttcactgatgctgccatgcagccccagcctctgtgctctctggacttgggacatatttgaagctgaccctctcactggcacttacaagagttattcatgggctcagtccccttcccattgggggattctaccatcttagtgtcagaagtgggctccccagacattaccatcacgaccaactgataagacaaagctgagcttattgcttccagcagaggtgaaagataaggtcaggatgtacggagaactggaagtttggtttaaagtgagtctttgggggagggagagttggcttgcttcagacagggcagagatcacaatacaacagtcctggattggtgggaaaagcaggctaggattttgaaccacaatattcaaagaatcttagggttcaaactgttgatgctttccactgaagagctgataggtcttcctggaagttgctgcaatgaacggttgaaccatttgcttaagcaggacagtcccagaagagtagagaaatgcaaatgaagacagtggcataaccaggtcatgttactctagactgtaaggtgtgatttccattctcactgtccaggacaagtgtggggaagatggttttggttctgattaatcattggttcaggagacagacacaccccaggccatagaatcacagcactgctgggatgctcagaaaaaaagacttcctgctgttctcagtaggatttgaacttgtaatataaagtctggttgctgctggcagccactctaagaggagagccttcctgagggtatggtcaacacagaagaaagaaaccaagcaatgggaagagaggaactggtcctgagtgaatcatctgagcccctgtgttcagcaccacctatgctggtcggacacctgagccagcactccgctgcttccacttaacctggctaggccattttctcctatcaggtgtaaatggggaatccccatgcactaacaatgggccagtgctcctaatcccggtgccctactgcgtgtttgcctggactggcctgaggcagagagggaggttccagtgatattaaagtgactgttggcattgaagagtcccagtgaattacactttatgatgttctctcctgcagctctgaaccagatgagagattggcaaagaagctaggtagatgacaatcacaatgtcagctttggctggatgtggtagctaacgcctatattcctagtgctttgggaggctgagggcagaaggatcactcgaggccaggagtttgagaccatcctgggcaacacagcaagatcccatctctatgaaaaatttttaaaagtagctaggcatggtgatgcacacctgtagtcccagctacttgggaggctgaagtgggagatctgcttaagcccaggagtttgaggttacagtgagctacaatcacgccactgcactccagcctgggtgacagagaaagagtctatctataaaaaaaaaaaaaaaatttaaataaagtcagctttattactgtcacagctggaaaagagcatggcttagctgagcaacaacaacagatttcccaacattgtaccccggaaccaggctgacctgtcccctggtcacaggcagtgctgggcaaatggtcctctgtagcttactatgctaaatgtgggcttcccatgggcacccagctcccacgcagagggaaggagctgggagggcctgcctggctcctccgtggaaactcagaaacttgagaatcagatgtcacacctcctgccctggggaggaatgagggagagggtggagcgaggccaggagcttagcctaacaaagctgctttcacaggcagcatgaagcaagatctcaggaggtctcccgccacctccccaagaactaatcaaaagcccaggaaaggattaaatctaaagtccaagtggttttgtgttaactcagagctgctccacttcagtgccactgacattcagtaccaggtacgtctttgccatggaggggctgtcctatgctttggaggaatggactgagcagcatccctggcctccacccactggatgtccacagcatctcatcacccccacctcccagtcatgaccagcaaaatgtccccagacattgccaaatgtcccatggggctgacatgacgcctggttgagaaccgctgggtcaggtgattagaaagacaaggatgggcccctctcctagatgccacagctgcaggagtcaggggaatgcaccccacctggaaaggaaaggaccagaggtgaaaagaagagtgaagctgtttctcctggagataggtgtggtggcagggagttagtggcaaggcaggagtctaccactgggtgggcaaagaggaacacatgtggcaaatccatgctgaataagtctgattccgcaggacgactgagaagagttccatgatggaataacgtatatgatgtgggtggcgtttagggataccaacaaggggcagggaagcaccctcagacaagcatccatggggcactcttgcctccaccatgcctgagggtaagggcaggaggcggtccccaggctgtaggagagagcctctgggcaggagctgtggccgttgggagaataatgccaccactgctatgcccagcctgtctagtcaaatcaatatcccaccttacttgtgcctaccctctgatctcttatggtgcctttcaaagaccaaacccaactggaaggtgggaaatgggccctgggggcagatgaagattactcagcacacacaccatggagtactttacaaagttagaagcaatggattagatgcacccagggccacatggaccgatctcagaaatataagaatgggtgaaacaaacaagcaacagaatgagatatataacccgatagcatttgtgaacatttaaaatgtatgcctagaaaaaatacaaaacatcaatactccctgtacaagaatacatgcaaatgaaagactcacagattatgagcctatggccaggcgcggtggctcatgcctgtaatcccagcactttgggaggccgaggcaggcggatcactttgagcccaggaatttgagaccatcctcgccaacatggcaaaaccctgtctctacaaaaaatacaaaaattagctggcattggtggcatgtgcctgtagtccccagctacttgggaggctgaggccagaggatcacttgagcctgggaccaggcagagaatgcaggagccgtgatcatgccactgaactccagcctgggcaacagagcaagaccctgcctcaaaaacaaaaaaagaacatgtgcctatgatggggaggggctggagactgggataggatatgtggataaaagagaataattacaaacaagagaggggacttacatggactagtgatgagaaagtgccatgaactaaggcatatgattaactaactcaaatgtctgcaaatgaagtttaaaaacagcggggaaagaaaaggaagggaagaaggaagagggaagatagcccatcagccctgtccagcatgtcttgggggagaggagtcggggtgggagcccctcaggggcgctcagtctctggtctggaggggcgcaatcccagatggggaaggagttgcctcagggagcctctcagaacttccttttcacttttataaaaatgggagacacatcaagagattgtacaagggcaaatgccgtcctcatttcccaaaatgattctagaattttaagccaccaatcttgacacctttgattttggaatgaattcaagtccaaagacccgaatggagccccgactttgtatccagccgggtatgaatcatccaacagatggtgggtgcacatttagaaaccagcccggtgagccctcagagacaggctcttaagacagccctgccaagctaagctgatgttctcttctgacatcagagaatttgtgggttctactctttctggcttcagggattagctgtggctccacaaattcaagtcatggggagtggggaggtggcaactgtcagaacaggaaagcagatgttaggtgctagctcagcctgagtcacatgtccatgctggagcagaagccagtgggcactgtgattgacagcaccctcaccaggactccagggaggtgggcgcacttgctgcaaaacaggggtgctaataccggaagaaggctgatgagcacacaaaaccaataactatgacagccctctaggatccccttggaagtggggatgagatgtaggggagtggaggaagaatttcatctttttttttttttgagacagggtcttgctctgtctcccaggctggagtgcagtggtgcaacctcccaggctcaattgatccacccacctcagcctcctaagttgctgggactacaggtactcaccaccgcaaccagctaatttttttattttcgtagagacggggttgctcaggctgtcttgaactcctggactcaagtgatctgcccgcctcggcctcccaaagtgctgggattacaggcgtgagccataacgcctggcccctattcttacttgtaacaaaacaggcatttttggttattttaatctactattgccttttatactggatttctgtcactcgcaatcaaaagaatcctgactgttctacaagcaatatgggggggggaaatcatttttgtgtttaatttcagtatccatgtgctttgccataaatgttttttaagaattttaaactattttggccaggtgcagtggttcacgcctgtaatcccagcactttgggaggccgaggcaggtggatcatgaggtcaggagattgagaccatcctggctaacatggtgaaaccccgtctctactaaaaatacaaaaaaacagctgggtgtggtggcaggcgcctgtagtcccagctgctagggaggctgaggcaggagaacggcgtgaacctgggaggtggagcttgcagtgagctgagatcacgccactgcactccagcctgggtgacatagcaagactccgtctcaaaaaaaaaaagaattttaaactattttaagggttttttttttaaattttggtggttaattcttaattatgacatgcattttaaagatacgctttcagtggtttatcatattttctcttttccacataaaacttttgaattatttattggcaaatgtgacttgtttaaagtgttaatttcatgcttttgcaggtgtacatttagaaatgagcacagtgagcctgcagagacaggctcctaagacagccctgccaagctaagctgatgttctcttctgagaccagggaatttgtgggttccactctttctggctttggggagactgtctgactacagaaatattggccacctaaagaatttaggtccttgccactcggacaagcatgaccagccccagttcccacaaagaaacatctgtcttgcttcatgtcatggagttgcttgtatagtttaagtttcgagtacttgtctgagcaagtctgtcttttcatggatggctgaaaatgctttatgaagacgtacacttcacaagagttaatagcagaaagcactgtgtcaaaacccaagacataaatgtaattaaaatcacattgtatttcctgttggttgctgaagtagacattaagaaagtcttatctttaatagtacatttaaaattccctgtcatagaaaattatctttaaatgatagctcagaaaagaaatacaaaaagctctcatgccatttattattaatgtgatttatgttaagtctgtcagtggaatgctgaaaatgtgccaatgagttagctcaagaaatgatgcaaaattaaatattaatgaagcactcaaacaagcaccaattacactgcagtataagcttgtaaatatttccataagtaattttcagtccgtattcaggtagcactatggagcaagaaaagaaccatcattaatttatgcagaaaccttttttactaataaattttccaaatcacaaatttaattttagcttttgatttttaaaaaggcaataaactgttaaagtttgtacttgaattcatggatactcttttttttttttttttaaagatggggtctcactatgttgcccaggctggtcttgaactcctgggctcaagtaatcctcccacattggcctcccaaagtgctgagattacaagcatgagccactgtgtctggccttttcttttcttttcttttttctgacacagggtctcactctgtcacccaggctggagtgcagtagtacaatcatggctcactgaagctttgatctcctgggctcaagtgatccttccacctcagtctcccgagtagcggggactacaggcgtgcaccattatgtccagctgatttttttaaatttgtagtagagatgaggtctcactatgttgcccaggttggtcttgaactcagctcaagcaatcctcccttgtcagcctcccaaagtgttgggataacaggcctgagtcaccatgcccagcccatggagagtctttatgttgcaagtgatagaaagcccaattcacatggtttaaacaaggagaatttgcctgcatgctttagagaaaagtgcaaataaaatgccgcttcaggcaagattttatccagcagcagaaatcccaactcacgtggcttaaacaaagagaacttgcctacatgcttacctgaaatgtatacttgaaatgtggcttcaggcaggatttcatcctgcagctcaaaggatgtcaccaagaacctggtgtctttatgcccttcctctctgtcttctgctgggtcaaccccttcctcaggtcagtggctcctagagtgcactacctctctctctccccttcaaaaccagaccactcattctccagctgtagggaagattggctgctgatggctcacagctctcgcagctgagccttcaggcattgtttcatgttcataaatgcccaggctttatttattcccatccaaagactatcctccgcctagcccaagctttatgtgatctgccaatgattggtcagtgcagaagtacaaaagcgtagtcctcctgcctagatctgagacaactctgaagggccacctcaggtccaaagctccctttagcatcagttgaggctgtgctgcaactgcaacccagttccacttttccacttctccctctgctcaacctgcttcgtttactaccttacaagtattgtttctgagaccatggcccagtcacttccagcgtgtaaatatccatcacaaatctattggcagggagggacccagacatgaggcagctgaggccaggagtaatttttaggaagcagattctaaaataggtgtttggagctggaaggtggagcaataattgcccctggcattctagcgtggtgtacttgtttaaactttcactggggatgtgcaggaatgatgggaaactgatggaagggaggcactggtggaagcaaattcccaggcatttgagaggtttgagtgaactagtaatataaggactgtgaaatcagatggctctggggctagcaatgcttaaaggaagacaatgaaagtttgagagtacttaatcatcagtttgagacaaagtgtgaaagtctcttggcagcatatagagactctgtagctggagggcagaaaaagctaaggatcagcccgaagcttcattataagggtaatgcagcttcagagaggttggattctcaatcagagcacgtccgctctgtcaggtcataccccagtagagaaggatcagaactcagagacttgggatggcacatctgggtcaatgcactaaaaaaatcttgaatctccagattccactgaacccactgggcctgcagaagcggccccctgcccactgttaagggctaaaactcccctcatgcttgaagatagtgcagggcctctgctttgcaagatgaaatgcacctccctcctggccaccagacaaatagctatcaagtcacaacaaaaccggccagggatgcgccagacctgctgctgaggaaggaatgagactgtaccctggaggagctgcaggaacttgccaacatgtgctggcaggattcaggagagtagagatgggactggattctgaggatgaggatcaaaacatagagcttgataggaaagaatattgaataggagtgtgctcctgtgatgcaggattttaccccctggcaaggaccccaggagaaggtgctagaatggctcttggaagcctagaaacagcactggctcaaactaagttaaggagaaaagttcaaacagcatggcagatggcagaagggatcaaatggatcaaaggagagggtttgctcaaccggatcagcctgtgtcgggcctgcaaattccccagctgactatgttccctgggagagcccataaatcactcttttaccaaagcagtaaagaaggtgctggtggaggaggagcagcagcatcgagaagtctatcgttggccattctcggggaggccgtgagggtgggagatgctgttacagagcggggtggtgggggtggggggagctgatagtaatagggataagaggagcccaaaataatcaaggccaagtggcagtgttacaggagaggggtcccgatccagaccgcaagagagggttcttggatctcacgcaagaaagaattcagggtgagtctgtagagtaaagtgaaagcaagtttattaagaaagtagaggaataaaagaatggctactccatagacagagcagccccgagggtggctggttgcccattcttatggttatttcttgatgatatgctaaacaggtggtggattattcatgcctcccctttttagaccgtatagggtaacttcctgacattgccacggcatttgtaaactgtcatggcgctgatggtagtgtagctgtgaggacgaccagaggtcactttcatcaccatcttggttttggtgggatttagccggcttctttactgaaaactgttttatcagcaaggtctttatgatctatatcttgtgccaacctcctatctcatcctgtacttagaatgcctaactgtctgggaatgcagcccagtgggtctcattttacccggcccctattcaagatggagttgctctggtttcaacgcctctgatagcagcacttatctgtcagaaggtgggcacgattctcacactgagcagcaaggtcagggaggcagccagaggtcctgctgcagagaactaagtaaatggtgtttttttcctttcttttttaagatatatttttaatagtaaagatggggtttcaccgtgttgcccagactggtcttgaactcctgcactcaagtgatctgcccgccttggcctcccaaagtgttgggattacaagtatgagctaccatgccaagccggaaatggttaatagaacataatattcctagtggtaagatagatgagcagccaaaaacagcttattttattttatttttttaatttattttgagacagagttttgctcttgttgcccaggctggagtgcagtggtgtgatctcagctcaccacaacctccacctccagggttcaagcgattctcctgcctcagcctcccaagtagctgggattacaggcatgcaccaccaagcccagctaattttgtatttttagtagagatgggggcttttccttgttggtcgggctggtctcaaactcctgacctaagatgatccgcctgcctcagcctcccaaagtgttgggattacaggcatgaaccaccgcgcccggcccaagagcttattttaaaacatcaaccacccaacaaaaagtcatgattccttgtcctgtttccagcctaagttaagatctagaacgtcctgaatgaagaaagacactgcatcagctggcatatggacaggataaggttccaccagcccttccacagggagaacttgagtaatcatacactggggaaagaatgcagatcttttgagaactgttgaacatagagtccaaattgacattgataccaaggaaactgaagcatcatcacggcaccttattagggtggtggaatatggggtcaagtaataagtatagtcccagccatgaccagcttcacagtatgtccattaggtccacagacccacctggtagtcattttcctggtctctctctctttatttatttatttatttatttatttttttgagacagaatcttgctccgtcacccaggctggagtgcagaggtgcgatctcagcttactgcaacctctgccttccgggatcaagcgattctcctgccttagccaccagagtaactgagattacaggcaggcgccaccatgcccagctaatttttgtatttttagtagagatggggtttctccatgttgcccaggctggtctcaaactcctggccttaagtgatccgcccgcctcggcctcccaaactgctgggatataggtgtgagccaccgcgcccggccctggtctcttaatatataactagaatcaacataaccagtattgccagaactcttccagtggttccttggcctgtggggtaagagccatcatagtgaggcaggtgaaatggaagcctttcaaatggcctcccaccccagccaatcgaaaaccacatcacatcctgggggatggcagagattaatgccacccttacagatgtaaaatgtggtctccataatttcctccatttaattcctcagtctggcccctacaaaaaccagagagatcctgcaggatgacagtagactaccacaagctcagtcaggtggtggcctcagtggctgccactctgctgggtgtgattttgccacagcagattcacattgactcaggtgcatggcatgtagctactgacctggcaagtgcattctttcccatctctgtaaaggaggatcaagaattgtttcatactgcctgggatggtcaatagcacagttgtcccttgatattcacaggggattggttcaggacccccacccctccacataccaaaatctgaggatgctcaagtcccttatatataatggcatagtatttgtatgcaacctacaaatatattcccatatactttagatcatctctagattacttataatacctaatacaatgtaaatgctacttaagtattttttttttctttttctttttctttttttgagacagagtctcgctctgttgcgcaggctggagtgcaatggcgtgatctcagctcactgcaacatccacctcctgggttcgagcaattctcctgcctcagcctcccgagcagccaggactacaggcctgtgccaccacgcccaccatgcccagctaatttttgtatttttagtagagatgggattttgccaatttggccaggctggtctcaaactcctgacctcaggtgacccacttgcctcggccttccaaagtgctggggttataggtgtgagccaccgcacccgacctgtaagtagtttttagtttttatattgtattttttatttatattattttttattgttgtattgtgttttttttactgttttttttctaatatttttaatccatggctgcggaacccatcgatatggaggccaactgtacacatttacagtcttgaccttaggcatgcgaactctcccactgtctgttataatatagtccaaagagaccagcatcttctgggctttctgcccaacattacaagtgcacaactgcactgattacatcacgttaatccaatcaaatgggtaaaaaatgacaaacacgttaaagccctggttaaaacgtgctctggcaggtgggagataaaccctacaaagattcaggaaaccatcacatcagtgaagttctcttaggagtccagtggagatattccctaggaagtaaagaggaaattattttatctttctttttttttttttttttgagatggagtctcgcccaggctggagtgcagtggtgtgatctcagctcactgcaagctccgcctcccaggttcaggccattctcctgcctcagcctcccgagtagctgggataacaggtgcctgccaccaggcccagctaattttttgtatttttagtagagacagggtttcagcatgttagccaggatggtctcaatctcctgacctcgtgatccgcccgcctcggcctcccaaataaattatttcatcttatagctcccattattaagaaggaagctcaaggcctgttaggcctcttcaggtgctggtggcacttggaatcctgttccgatctaattactgagtgaaatggaagactaccatctttgagcagggcttgaggaggaaaatgtttcgtagcaagtccagtctgtaatatgaaggagcacagggaacttcaccccaaaatatggctccctggtatgatgagtatttaaattaaaggccgttagagatcaatagatgctagaagacacttttgccttgtgtacataaagaccagacagacccacctaggagaacaattattttccttcccctcccccctatttcttaatcctttgagaacttcactgacgtcatggtttcctgaatctttgtagggtttatctcccaccctctagagcacgttttaaccagagctttaacgtgtttgccattttttactcgtttgattggattatcatgatgtaatcaatatagtagtggacttgtaatgttgtgcagaatgcccagaagatgctggtctcttttcttaatcctctatttcaagcttgtccaacccatggcccccaggcagcatgcagcctaggacagctttgaatgtggcccaacacaaattcttaaactttcttaaaacattatgagatcttggccggacgcgctggctcacacctgtaatcccagcactttgggaggcctaggggggcagatcacctgaggtcaggagttcaagaccagcctggccaacatgggaaaccctgtctctactaaaaatacaaaaattagactggcgtggtggcaagagcctgtaatcccagctactcgggaggctaaggcagcagaattgcttgaactcgggagacggagtttgcggtgagccaagatcatgccgcagcactctagcctgggcgacagagcaagactctgtctcagaaaaaaagaaaaaattacgagatctttttgcaatttttttttagctcatcagctaccgttagtgttagtgtattttatatgtgacccaagataattcttcttccaatgtggcccaaggaagccaaaagattggacaccctgccctatttatttcaaaacacaggctgaagttcccttatctgcctaaagtctggatctaccaaagaagaaaacaattacctccagtcccttctctgagtttgtattaactgaacccatatcacaggaagtaagactaaagcctgttaacaaaccgggacagacttttgtcacaaatcattgtcccctctgcgggcccaacggacttcgccccagaccattgtatattcttcaaccccattgaattcccctaaaaatcatttaccatccccctaaaatcacccacacttccccatcccccctttccctaagaagtagggtatacaagcatctgtaccccattaggatatggggcacggtagtaatgcatttgtaaaggcttttctcttattaatctgccttactgtgggttgatttttcagtgaatcttagagggtgagggtgtagggagctgctgctccctacaagtgcaagcagctctgccatttggaccctatgactcaaagtactctatggtactacagatatctgtgggaggaaaagattctgtgtgaagtttacagaaagcaccagtgggagaatcacaacttatatccctagggttctggagcaaggctgaactatccacagtggagaactccacgtcagttgaaaacgagctcccaggttgcttctgggtcttggaaacacagcatctgtattagtcagggttctccagagaaacagaactgataggctatatagagacatagaagaggagacttctatggcaattggctcatgcaattagggaggctgagaagtctgcaatactgtctgcaagctggagaattaggagagccagtggtataactggcttgaaagttacaccattggctaccctgcttctcaggccttcaaacacagtcagagttacaatagtgcaacttccagtccaaggccaaagaactgaaaaccagggaggctgctggtatcagtcctggagtgcaaaggcccaagaaccaggatcttcagtgtccaagggcaagggaagatggatgttctagctcaagaaaagggagtttgggtatggtggcttgtgccggtaatcccagcatgtccaggtgggaggactgcttgaggccagaagctggagaccagtgtgagcaacatagtaagacctgtcttaaaaacaaaaacaaaaacaaaaaacatgtccgggtgtggtggtgcaaacctgtaatcccagcactttgggaggccgagaccagtggattgcctgagctcaggagtttaagaccagtctgggcaacatggtgaagcctcctctctaccaaaaaatacaaaaaatcagcagggcatggtggtgcaagcctgtggtctcagctacttgggagtctcaggtgggagaattgcttgagcctgggaggtggaggttgcagtgagttgagatcacgccactgcactccaacttgggtgacagagtgagaccctgtctcaaaaaaatatatattatgatatataatttaatatataaatgtgtaatatgtattattacacggtttcagtactacctccaggactggtcacaaacaggaccagcaggctcaagtgaactgcataagcagatgaccacgcccctctgccatccaccactgttgaatccctgcctcctccttctatcacatctatagccaccttggggtagagggtcaggggcctagaaccagctgatgcaggacaaaaaccaaccaggtttgcttcttggatgagttggctgggaagagggggtgaaagccacaaatggacactgaaagcgggggtgaaagcccttggacactgaagatcctggttcttgggcctttgcactccaggactgataccagcagcctccctggttttcagttctttggccttgggctggaagttacatgttgtaactctgactgtgtttgaaggcctgagaagcagggtagccaatggtgtaactttcaagacagttataccactggctgtgctgctctgtggctctactcagggctggccctcgaagcacaggggcagagcttcatgtggtatgtgtgattgtccactttgtgtgcacagagaatggccagcagagggaatggccgtggactcaggggtagtggcaagtggcttggcttgttgctcagggacctagaaggagacacatcagattagggaaaagcaagtctggggaaagacacgtggatgggcccacgggggtgggcacagagtgtgaagatttgtatcacatgttaatgtgatcaatgaagaccacccaggggctggagtgaagccaatcccagccaggccagagagaaataaagagacagttttgacagaagggataaagtgttcttggaggcagaaacagcagatgtccattacaatgacaaattcttttttggaacaagtaaccaagaaaaatttccctagatccttacttctagatagagtcgattggtccagtctctcaccaaaaaggtaattaaccggcttctgtgtgaatactttcaaatcaggatccttactacctgtagaggcaacatgtgtccctcgaggacattcgccattgaggcaggctggggttttctctcctaccctccagggaggtgccgttaccctcccccatcttaggctcacaccaagctaggatatggaagaaggtattctttttttttttttttttttttttttgagacagagtctccctctgtcacccaggctggactgcagtggagcaatctcggctcactgcaacctccgcctctcaggttcaagcgattctcctacctcagcctaccaagtagctgggactacaggcacaccaccacacccggctaatttttgtatttttagtagaaacgaggtttcactatgttgaccatgctcttgaactcctgggctcaggagatccgcccaccttggtctcccaaagtgctgagattacaggcaggagccactgcacctggctgaaagagggtattctgataagatgaagaaaaatgacagatgctttgttcgcagagcaatctagtgaagttatgctgcgggaaatgatacattttactaagagaatgaatggtttggtaaatgtttcactcatgggtgggtggggggaactaaaaccatctccctaacacacaaaccacctccacttccactgaaagaaaaaccagaaagaatcgtttggtgagagcctggaacagggatgcaaatggaaaaaaggccacggggactggggtaggagttgggcacggggtgtatgggggagaggagagaacaacgagaaaccagagagggagatttgctgagctggtctctataccatgcttgaggctctgactgcagttgattgtctaatgacgaggcttcctcttcctgcccttatattatttatttatttatttatttatttgagatagcgtctcgctctgtcacccaggctggagtacagtggtgcgatctgggctcactgcaacctctatctcctggattcaagtgattctcctgcctcagtctttggagtagctgggactacaggcgttcgccaccacagctggataatttttgtactttaagtagacaagggtttcaccatgttgtccaggctggtctggaactcctgacctcaagtgatccacccacctcagcctcccaaagttctgggattacagatgtaagccaccgcgccaggcctgcccttttaaatagtaagggttatacttacctgtggcttaaattggtactaattacttcttttttatttttttattttttcttgttagattaagagatgatttatttgaatgggaaaggaatagaataagaagacacttttattatcaccatgaccatatagaaggaggacatatttttaaataatatgagtggagccagttaagaagcaacgtttcttctagcagatttactattaccccctcccccagattgtcttcccacgttaggcccaaaattctacttagaatgactggctttacattccatttagtcctgaggtaatgtctccaaaagtatactgaattttgaatttagagaaaatgataacagacatggatgtcttcatttttattcattttttagagatggagtttcattctgttgccccagctagagtgcagtggcacgaatgcagcccactctgcctcaaactcctgggctctaattacttctgagtatgatccagatgtctcttggtggagccacattaagaggcaggccacggatgttgcagtgagccgagatcgcgccactgcactccggcttgggcgacagagcaagactccgtctctaaaaaaagaaaggcagggcagtgtggcagctgcctggggcgagcctttgggattaatcagaaaggtgctgccagtgacctcaggtttccacctgggcttcctcacataaggggtgagatgtaaacgatccctatcccaccagagtgggcgatgccctcgagtggaaattttaaaataccgttcactggccccaaagggtttctgtggagtgttttcacagaaaacgcatacatcgcaaagtgcggccatgggcttggcagcaacttcaacgcagccggcgactctgatgtgcttccctgaagtcagcagctgcagtcagctgaaattacaaaagcaaatcacaccaggggatgctgctcacaccagaaggagagatttattttgttgcctaatatttaaacagtttaaaatcctcacaataaactgtctagttcagaaaagaggatgtaacaaatgcatgcaataaatccctcatttttaatgaaagggaatatatttagtttttattaacagaacatctgtttctctccatctccacttaataagtgttcaaagaatgttggtttgaaggggcacccgcatctcccagtcctccagccctggccttaatagcctgtgagtgcaaacgaggccatgttatcactgatgcccaaccacaaagtgctttgcagcaccccaggcgcacagccgcgccctccccagcatctctgcactggcctccctgtgcccagcaagcctccctgtccgagcctcctccacagccagccacttcccacgtgctccctcataaggggcccagcactgccgtggattctggaaccatgcagcactcgaggcctctgctgatgccgtgggccagctggtccatgctgggggcacccagagcccctgggccgtgaaacaactttctgtagagatctggaggtagaggaacagagggacaagggccctgggcagctccataccacccactgtcacttggactttgaggggcagagaggtgtccagagtgtccccacatccttcagcttctggcctgacacctgtcttcatgaggatcctcaacctgtttcccaggctgggccaggagatagcccctccattccctcccttctcctctcccacttcctctctctccttcctggattttcctctttgctggtgtgtgcatgcacacacacacactgcaggcatgccaccacacccagctaatttttgtatttttagtagagacggggtttcaccatgttgaccagctggtctcgaactcctgggctcaagtgatccacccgccttggcctcccaagcccatgagctcagaggttttttgcccacttaattcactattatatccttaatgcccataacagtgcctagcacataatagatgctcagtaagttttgtagaccaattgaacaaaaagtgaataaaagaaatgctcatgattcctccttccacataagagcccaagcccctctatgtatcatttcagataaacagaacccatggggtccccagtccatcagctctacaggttgggctcagctgggaaacctgctataggggatactgctgttatcagcacgccctggcctcaccagctggggtctgcccaatgggcacaagtctgagggctccaattcccattccactcaactccaggaagcccagccttccgcagtactcctgggacccactgggccctactgacctgttcccttgggtcatccttgtgccctgtgcctctgcctctactgcccacttggctctctcctcctactgccccctctgtcgcaacctatcccagcctcctacagccccaccctcttcctccctggcactggctcagacccttccacaataggaggagacaaggttctaactactaaggactgctgtaagtttgaggctagaggaagaaaacagaagatagaaaaacgcatgcgacagcttctcaatgaacctgagctcatcctccaggactgctgacatctccttgaacaccccagccagctgttacgggcagggcagccgccctcaagtataggatttctcctttgccatcactcttccctcaggtcctactgctccccctcagcccctccgtctgcagccccttgagccttccttctcttccaagaatgcaccggactcactgcgccacaggacctgtgcttgtcctgggatgcacacccccagaacctgtcctggtcatggctttctgtcctcctgttgccacaggggggcttctctgagcacaccatctacaatagccactgagcccttctctatcgcttcagcctctttatgatcctcacagcgtctgccgctatctgcgtctctctgactcattcatttctgcttatgtccttctctctttggtagactgttctgtcctatatcccagtgcttagaatagtgcttggcccaggcacagtggctcaggcatataatcccagcattttgggagactaggatggaaggatctcttaaggccgggagttcaaggccagcgtggtcaaaatagtgaaactccgtctccacaaagaaatgttttaattagctgggccagcggcatgtacctgtagtcctggctacacaagagttgaggtagtatcgcttgagcccaggagttcgagactgcagtgagctataattcttgcactgtattccagcctgggtgacagagagagaccttgtctcaaaaaaattaattgttttaaaagaatagtaactggcacatagtaggtgctcagttcaaatccactgggtgatgaaagctgaatatcctctctacttggagtcctgggcaaacaacaacccagtcctgagagaggagaggctttccttcctcctagctttaggttcacctcccagtttctgatatttcatgatgggacctagctcttcccagaatgcctggtggtggaactgctgcccctcctcaaggatcaacagggatgtggccctgagccccagtcaacctggacagaactccccaacatcaagacgcttcatggcgatggtcatccagggttgaagaccactctgtggagggcatcagctgtccagtcaaagttaatccctggccaatccaggccagtttcttttcagtgagtcaaagtgaaaactgagtcaggcctatgtgggcttcctcagagccccagcaattctgagaagcaaataattagtatggaggtctggttctgcacagcatgaccccttaccatgggggaacagaccacttacttcgtcacaggatgacactggatggtcaatgactcaagggtactctccaggaaggatggggggaacttgcttctcgtccatgtaactcattcccctcctggtgctttgcccagaatatgaatcagccttggcacaaggtgaattcaagagtccactgcagttgcttacacttattttttatttttatttttttcagagacaggctgtcactctgtcacccaggctggagtgcagtggtatggtcatagctcactgcagcctcaaactcctgggttgaagcgatccttctgccccagcctcctgagtagctggaactgtaggtacgcacaccacgcccagctaattttgttttcttttttggtagagacaaggtcttgctatgttacccagactggtctcgaattcttggcttcaagcaatcttcccacctttgcctcccaaagtgttgggattataggcatgagcaactgcgctgggcctgcttccacttttcaaaaggcaatgtttccagatctagccctccaggtttccaaagccccccggggccctgggcattctgttctcagagtgctttctcctgcattatctcctctgatgcacaaacaccggggaggcttgattaactgggaatggctttagttgttttagcctctctatgataatttttaaaatgttagaagcacagcagatgactcttgaagtgtttcacaatcagaaatcaaagcaggggggaaccttttaaaatcaggacagaccaagagtggaacaagtgcctcacgtatgggtaagtgcgctgatggggaagtagggggcacatgcactgggaatcgggcacgtgtggtcagccctgcctggaggagcgaagggaccttgagctgcactcaaatgagattgtgcatgcctggtaacagctgatgagtggttcagaggttgtccaggcctgtgctctgccacctgatactattttcatgcagaagcttctgtcttcagagcctttgacctcagaatattgtatcacagtaaccaggaaaaaagccaaaaagtgtggaatgtagaacgttaagaataggaagctccaacgtggccaacgtggcaaagccccatctctacaaaaaatacaaaaattagccaggcggggtggcacacgcctgtaactccagctacttgggaggctgaggtgggaggatcgtttgagcccaggaggtggaggttgcagtgaactgagatcatgccactgcactccagcctgagcgatggagcgagaccttgcctcaaaaaaaaaaaaaagtaattacgttttctccttttcaaagtttcaagtagacatgataattgtgaatatgtaacacttggctgggagcacctggcagacaggtggcacagacatggctctctggatattgtccttggtctcccctgattcctatcccaacaaaatacccctgaaatggccatccgaaaacggggaagacttgcaacagaactgaaaactagccatccacaccaaggaaactggaggaacttcaaccggactgtgactatggggccaaatggaaggcatcactgagagaaaacaagccgtcaccctgtgtgttcaggtcaaagcaggaaggctgggcactgtggctcacgcctgtaatcccagcactttgcgaggccatggcaggtggatcacctgaggtcaggatttcgagaccagcctggccaatatggtgaaactccgtctctacaaaaatacaaaaattagccaggtatgatggcgggtgcctgtaatcccagctattcaagaggctgaggcgggagaattgcttgaacctgggaggtggaggttgcaatgagctgagattgcgccactgtactccagcctgggcaatagagcaagactctgtctcaaaacagacaaacaaaaaaacaggagatgccagctaccccagggagtcccctgcactcaagggcaaggactagaggccagggtggctggagggatgatgaggcaagggcgcccccaagcttccttccactccgtatccccgcagttttcagaccgccccaagtgcactgtgggtgcacttttccaggcaaagtaaagctcacaggatctggggaaagattctgcagcttgaaagataaacatccctgaaggtttggaggaagctgcctctctgtgggggagcgaatttactacagcacaagtttaaaaaaaaatctgaatatttaattcaaattctcaataagattccatggggtgctggaaaagatctagaaactagaaaagatcctaataaagagggagacatctgagagcaggaagtgtagcaaggagacagaaaccacaatagctctggtgggaaaccatgatggaggctgtaaatagcagacaagacacggagaaaataaaattaacatgacgaagggcaaaatgataaaaagacgaaaagaaagaggcaggcggtcagacacgggggatataacctgggaataatcggaattctggagagaacaaaacagacatagggaaagcagtattcaaagaaatgggaggggaaaagtttcctgctgtaaagaaagaactcaactggaaactgagagcatgttctgacttcccagcaaagttaatgaaaagagggccccgcttagacacactatgatggaattctcaaagttaaaaaagttaagaaaattgccggaacatacacacagacacacagacacacccttgaaataggaaactgaaagggaagagagattttactttacttctttttctttttctttttcttttttttttttttgagacagggtcttgctctgttgcccaggctggtgtgcaaagttgcgatctcggctcactgcaacctctgcctcccaggttaaagtgattctcatgcctccccagtagctgggattacagtcatgtgccacaacacacagctaacttttgtatttttttgtagagaaaggagtttgccatgttgcccaggctggccttggactcttggctcaagtgacctgcccgtaaagtgctgggattacaggcatgagccaccatggttggccagagattttacttttctatctttagttctcttggattttttttttttttttttttttgagacggagtctcgctctcttgcccaggctggagtgcactggcatgatctcggctcactgcaacctccgcctcccaggttcaagcgattctcctgcctcagcctcctgagtagctgggattacaggcatgcgccaccatgccccgctaatttttgtatttttagtagagacaggatttcaccatgttggccaggatggtcttgatctcttgaccttgtgatccacccgcctcagcctcccaaagtgctgggattacaggtatgagccaccgcgcctggtcatattttttttaaaaagtttttaaaacaaatttaaatgcaggaaggggcagtgataaataaggatcttacaaacaaatgggaaaaaataacagagagcttaaattaaaatgatctcagacttcccttgagcccaagagttcgaggctgctgtgagctatccctcctgaatagtcttcttgaataaatcactgtcttctcaagactacagcatgcaaaagaagaaaatgtcaatttctttttatctcaagtcatcattagaaatacattgtacttttagaccaggcgtgctgggattacaggcgtgagccactgtgtggagctttgtttttcttgtttttctgagacagggtcttgctctgtcacccaggctggagtgcagtggcatgatcatagctcacagcagcctcaaacccttgggctcaagtgattctcccaccttagcctcccaagtagctgggactacaggtgcacatcaccatgctcgactaacttatttttttttatttttcattgagacagggtcttactctgtcgttcaggctggaatgcagtgacacaaccatggctcactgcagcctccacctcccagactcaagcaatcctccctgctcagcctcctgagtagctgggactacaggcatgcaccaccacacctggccaattttttttttttttttttttttttttagtagagacaaccaggctggtctcaaaatcctaagctcaagcaatccgtctgccttggcctcccaaagtgctaggattataggtgtaagtcaccatgtcccacccccattctatgttttttaaaatgtagccataatcctttaaattgagtgggttgtgacctgtagtttgaactacactgatctagaaaaacctaaaggataggccatgttgtcattcatgtatgaaggcaacaaaaagacctcaggtgtggaagttatttttaaaagaatccctcctgaatactcttctttaataaatcacttgaagatgtatgccaggacagtagagaaaaaatcagatgtaaatactcaagaatgagaaaaatatctagcttgaagcacctgcttagaggtttaggggaaggagagttttcatgtcttctcaagactacagattgctagcacctttttgcaatgttctggcaatatcttttaaaagagaaatgtacatacccatctcactcttggaaatctatcatacaaaaataaagacaccagtatatcaggtgatatgaactaagatgcttcttgaagccatatgtgtaggggcaaaataactagcaatgacctcaatgcccaataacaggtgaatggcttaataaattatggtgtatctatactaaagtaataaacattatgtagctattatgtattaacctggaggggtatccatgataaaatgatgatttatttaaaaacacagtgttgggtaatttctgtatcatcttacttctgtaaaacatggagtggaaacctaccaaagggttgacatctgcatatatttatatgagcagagagaagaatgtggaagcaacaaagcaaacgggccaggctggttaattctaagtagagagcagaggggaaagaaagggagatcattggctgttctgaaacagtttttaattaattcgttgccttatttttgaaatttttgaactatttcttttgagacagggccttgctctgtcacccaggctggagtgcagtggtgtgatcatggttcactgcagcctcactcccctgagctcaagcaatcctcccacctcagcctcctgagtagctgggactaccgacggtagtcccacatctggctaattttggtatttttaatacagatggggttttgccatgttgctcaggctggtctcaaactcctgggctcaagctatctgcctgcctcaggaagtaattttttaaattatctacttggcaaagggcattgaacaagttaatatatatgcattactctaaatatttttaaatagtctcaaaactgaagattaaaaaaaagagagattattcccttaaaagaaattagctacattataaaccaaaatgacaaagttcataaccccagatgaacttttaacaagtgagaatgatccttgttcacatagtagagagagaaaagaagtggggatgaatagggagaaactaattttctacaatgggaaataaaaattatagttctatgaggactgtgatcattgaatatctgtgaaggctaaagcaactccatattggaggctaagccgccatgatgacttctgattagccccaattctgggaattcctctaagctttccagtctatctattgttacctgtgtaagaacaggtacttacctcccttaggtcaaaacaactttgatgttatcatacttcaattgtccttcacctgccttctggatcacatataccccttccctgtggtagataagccctgggtcttagggggtaacatcttgtctccctgccagccactgcacaagacacagacctggcttctgtttctaatttcctattgtttatttctaagaaactgaatttgtcagcctttttcttcagtctctcagtttccttggactttggcgacaggtttgcacaggcctacccactgaggaacaatgtcacattaaaattatctgaaaagttgtaagtaaacacaagtagaattttaaaaagaattctagagctagcacagtggtgcacacctgtagtcccagctacttgggtggctgaagagggaggatcacctgagtccaggaattcaaggccagcctgggcaatatagtaagatgctccttgtctaaaaaaagaaaaaaaaatttttttaaagaattctaattcttgctttctaaattattaaggaagattatagcagacgaacagtctatatagccctgaaaggaaaattaacagcaaaatgcgtttaaggcctaaaactcaggcgcagtattaaatgctgatactgactttatatgcggtgaaattgggaggctttgactggcctagccacaagttcacctcctcactctgctcccttggataaggtcccccagccaaataaccccccttatcaaggggaccaggagcacttcctgcttattcctgagtagtgggtttcagtttcctgccagcctgcagcctgcataattatccacataagccagtcacatcttcctgctgaaactaggggacatctcatcctcttgatactacaaagcctgcctcccacagcccttagttgctcactgtctctgagcgcaacccctgtgtggccctgcatggtgtgtgatatcctgccctgggctatgagtatatgtgactaatacactactgtcaatctcatctgcccagaatcaaatgtcgtgtgtttggccatctctgtaaacctaggatgggaatccctccctcaccaatggagtgaatagcacagaaaatattaaggaaagccattaagtaagttgataaaagctgtaccaaccctggtactgctggaagagaaaaaggagaatagaagattttaccaatccaacagaatatagtaaagggaaaaaaagtggagaaagaaggcagtgagcagaaaatgtggaataatcataatcaaagaaaatccaaataatccattaatggcactaaatgtaaactgattaaagaaacagtaaaacttagagtatcagattgagttttaaaaatcaaaatcctcttgtatgttactaatattttccttgaattctgaaataatctcagctatcatagcttcaatattatttccttgccattttccttattttcttactctggaaatcctgttatacatagtttgagtctctcaatctattctcctactcttcaaactgttcttatttttaatcaaagtacctctttttgctgcattcactgtcaattctttagagctatcttccaattcactaattttatcttcaactatatccagtctaaagttcaccctatcttttgagatatttttattgcttttctacatttttatttctgagatgtataattatttatatttcatatgtatatcttcatttcattttcatctacatttgtttcataatttcttgtttgtcagatgatttcttcatttacttctttgagccatccttattttcaagtctttgtcatatgagtccaagagatgaatttcatgtggagaaagttcatattccagttgttgaattgcttggctatcttttttatcattccatttcttcatgtcctttggaatttgggtttacaggctcattgtagctgagaatttttgtttttgcattgtgctttttactctctccttttttgtctggtgggtttagtttcgtcatggcattcactgtgccctagtccagaaatagttttgtgatagtggttgggaactcatgctcttcactgatattgggagatgtgcagacccagagttagaggatggcttgacctaagtctgggttgtgaggctgtttttgttctgcagccttcctaggtccaccatttgggccatagctcctgagatctggtcagctgcactttttgttttcagtctcctttcacaagcagggtagcctcactctagtctgtggctgctgccagagtctggttccatcccccattccctgtgcaacattttagttcccattaccccataggcccttggctttggtcctactcaccactttgctttccagtttgttctctttcttatccacctaaatgtttatcctgtttttaagcttgtatatatcttatcaatgcctttaaaaactttatctctcattgttaagtatttggagaatagagagtgggtcaaagtatgaactttccaaccttcccctcattattttatttattaatttatttcttttttgagaccgaacctagctctgtcacccaggctggagtgcagcggcctgatcttggctcactgcaacctccaccgcccgggttcaattcttctacctcagcctcctgagtagctgggattacaggcacgtgccaccatgcccagctaatttttgaatttttagtagagacagggtttcaccatgttggccaggctggtctcaaattcctgacctcaaatgatccacccccacttggcctcccaagtgctgggattacaggtgtgagccaccacacctggcctcattaatgtttcagtcacttggaatggagtggagacagagtttctacttctcacagtggaaatatactagccaatagaatctgggggtgaaagagctgagcactgagactgcaaccctgggagtccaagtaatgggcactttgtctaggcttagtaagcaggtcaaggaagtggatcagaggagcagtgaaagcccgtatgggcaacttctaattatggaccagcttcctatagcaaccccatgtagaagtaagatgatttgcaggagcagaatattccatcaccagtgctcttcagcttgggtgtggaagcccagttcatatccccgggtgaattacacgtgcccaccccacaggctttttagacaactagaggaccaaagaggaagcgaatattgcatatgggctctcggctggctaaatagaaaaatgaaagatatgtggacctttcatttttggaacacttcatactgttgacatacaatataaataaaataactgcaaaagaaaaataagagagatgcagtggagtgtttacatttttctctagaataacattcataatgacgatgttgattctgttaagtaagaattataggaggccattgttttgtactgagctcctgcactaggctccaacagaccagactaaaaatcaaaatggattcactcatgctggggtttcaaaattgatattttgtcctttaatacctctattttccccctattggttattttgtgctatcagaattttgtgctattttttggcaggagatgggaggatggtcaaaagtcaaaattacaacaaaaatagtttaaagatcttaattggctttatttgtgattctagaatcaggcaacacttcacccataaaatagaaaagtattccagggagcccagcagaggaggttgggcttacagacagagaagggctgaaaacagcagatgcaatgagcaaagagcatcttcattaattttcaaagttacttttttgtggtaaggcaggaatatagagacagaacaatagaaaataactgatgagtgaacatcaggttacttcaggctaactttgtaatgtaaggattaaagcagagggaacttatgccaattaaaattttaaactggcctgtttgggaaattggccattatttctctctcttgatttctcacaaggtcagatagtgactccattttgatttttagtctggtatgttggggtctagcacaggaaattagccatatatatatacttttttttttttttatacaggatctccttctgttgcccaagctggagtgcagtggcacaatcatagctcactacactctcaaccttctgggctcaaatgattctcctgcctcagcctccctagtagctaggactataggcgtgcaccaccatgcctggctaatttttttttatttttatagagacagggtctcactatgttgcccaggctagtctcaaactcctaggctcaagcaatcctcctgcctcagtttcccaaagtgctgggattgcaggtgtgagtcaccatgcctggccctcctataatttttatttaacagaagttaccaaagaattagctctcaaagggctcctgttagatgcttttgctagcaagacttttcaaatgcttaaggaatagcagtgtctactgttacataaattatttcaaaaacagaatttaaaaaatgctcttcaacttatgttgtagactggaataactgattcccaaatctaccaaagctttaacaacgagaaaagaaaaccacaaactgggggtgtctacaagagccagaaaataacataaatgggtgcagctgattgggtatgaaatgaaaggaaaaggtgggagctgcaggcactggtgagtgtgcaccccttcttcaggaattcaaactcaaatgcttcaaaaccctgtgctggtcaaataaacaaggcctacaagttacctctgattttgcagcttctggtatatctccattacaaacatagatgtaaacattcttaggccgggcatggtggctcatgcctgtaatcccagcactttgggaggttgaggtggatcccttgagcccaggagttcgagaccagcctgtgcaacatagtgagaccctgtgtctacagaaaattttttaaaaattagctgagcatggtggtgcacctgtggtctcagcttctcaggaagctgaagcgggggatcacttgagtccaggagttcaatgttacagtgagctataatcatgccactgtactccagtccaagagacagagtgagaccctgtctcaaaataataaataaataaataagaccaggtgcggtggctcacacctgtaatcccagcactttgagaggcccaggccagcggatcatgaggtcaagagattgagaccatcctggccaacatggtgaaatcccatctctactaaaaacagaaaaattagctgggtgtggtgatgtgtgcctgtagtcccagttactcgggaggctgaggcaggagaatcgcttgaacccgggaggcagaggttgcagtgagccaagattgtgccactgaactccagcctggcaacagagcgagattccatctcaaataaataaataaataaataaataaataaataaataaataaaatattagtaaatccaattgaacttatactacaacttaaagaaaaaaaacagctgctaataccaagtaacattcattctagggatgcaaaaatgttttaatatgtggaaattatttttaaaatatttcataatctcattaggtcatgctagaaaaacccatatgatcctttcactaggtgttagaacttcctgacaagcagggacccagggatccagagctggcgtgggtgtggactggcagagggtacacgcaaaggtagcatccagagggaaagccaggatcagggccagcagacagcctagtaaagtgtcaatcagaaggaactggatggataagcagaaagcagataaaggccacgggacagagcccgaggagatgcttggaggcacagcctggaggttttcctgcagggacctccatgcctgctggtgttggaccaaattcggactctagctgctgcaaatgcatttgaaaacattcagcatacatgcctcataaagtagccctaaaaatgaagactataaggatcatttcttcacataagaaagaatatatcatgcaggcagcccaattatgactaaagactgctttcctattctgcttttctgaaaaccattttgtattttcaagactttttacaataaaagaaaaaagcacaatggaacctattagagaacccgaagaggagacagagggaaacaatgattcttgcaatttatatggtgaaatctaagccagtctatgcatgctatacctcaataatctgggattttatttttaattattttttagagacaacttgccatgttgcccaggctggtctcaaattcctgggctcaagcgatcctcctatctcagcctcctgagtagctgggaattacaggcaccacaataaccagataacgaatttgtttaaaaaaaaaaaaaaaaaacaacagtgggctgggctcggcggctcatgcttgtaatcccagcactttgggaggccgagacaggtggatcacaaggtcaggagtttgagaatagcctggccaacatggtgaaaccccgtctctactaaaaatacaaaaataagccgggcatggtggcgcgcacctataaccccagctactcgggagaccaaggcaggagaatttcttgaatccgggaggcagaggttgcagtgagccgggattgtaccactgcactccaccctgggtggcagaacgagactcaaaaaaaaaaaaaaaaaaaaaaaaaaaaaaaaaaagccaggcgcggtggccacgcctgtaatcccaacactttgggaggctgaggtgggcagatcatgaggtcaggagattgagaccatcctggctaacacggtgaaaccccgtctctcctaagaatacaaaaaaaaaaaaaattagccagtcgtggtggtgggcgcctgtagtcccagctactacttgggaggctgaggcaggagaatggcgtgaacctgggaggcagagcatgcagtgagccgagatcgcgccactgcactccagcctgggcaacagagcagactccgtctcaaaaaaaaaaaaaaaaaaaagagagaaatgggggaaaggaaaggaaaggatagccactaaaatgttaatgatgatcatcttaaggggtgggattgtaggtgacttttactttttttcttattcgtttagtgtttaaatgttatataatggatatttattacttatataatcagtgaaaaataaagctattttcattgttgtggggggaattcttggcaggtagaagtccctagaggatctgatttaatgagcacacaagatcaatatttaattaacatatcaattgccgggatgtcaactgatgttttccaaaatcattgaagtgtaggctctcttaagtagccaaactgtcgtcggaaacatagtttacaattctcccatttaacaaacgcggaggaacagaatgattacaaatgctaaagcgcagaagacgattaaaggaggttatttatgtaccatcaaatgcttgtgtatcctgtacacatcagtttagaattctctcatcaacccaaccttgtggcaacttccaaacccctccatcatggccttctaacttttcaaacttttttttttgtaagccacttctctttccagacctctctgtagtggttcctaacgtcttccctttaaaccttctaacttgtgtttgctatttttatgacttcctcctcccagtgcctggcttccccagctggggattcaccttgctttggtggccactgttttgctcttctcgccttccctctctccatgggcctgccaggcttagggaaggccgcaggtgcttagaccttgtccaatgcggtgctcattgaacacgccgggttctcaaacaaatgttagggacagctggttagacgggaatctgggcctcccctgcttgctttccgcaacatttcttgagcattgctgggtgtccaaggcagggcgagatcccagagcagtcacgaccggatgtatgattggtgctcactgcacagtgctggggacgcacagggaggatgccactgatggtgtagggggtggggacttggcagagggagcagcatgtgtcgaggtctactggttctccaagtttggtcccagagcaaaggcatcagcatcacctgggaacctgctgaaaattctaatgcttaggcctcactaccgacctaccaaagcagacactctgggggagggaggaggggcactaaaaatctgttttatcaagacctccaagagactccaacacacgctagagtagtttgagaaccacgactctgggagcggcctgaggatgcttaggatgagcgcagagcggaaaggaggattcgtgaaggctctctgatgccagtcaaggggttagactttgccccgcaggtgcggcctccaggtttttaagcagacgcctgtggctctcacacgccctctcccaaggcggcgtctctgggagccctggcgttccctgggcccccgggaccgagagcttacccgcgtgggactgaactcgcccacgacccccgacaccaggcaagagaggttgtgccgcagaccctccactccccagcaccaggcgctcgccgtccaggtggaggggagcacacgtgggagccaggggcaccggcggagacacgagcgcagaaggcacgcgctcaagcccacgcccgcgactgccgggactgaaggtgttgcgagccccggctccacccctagcctgcggtgcgccgtgctttggccccgcaggccccgcccccggccccgccccggcgcgcgcccggcccgcctccctaggcgtggaggagggggggcggctcagccccgcgcccgtgcgcgcgctcgcggccgggttgcagggctgggcgcgcgccccgcgtcccgggcaggaagatggtggcgagcgcgcgagtgcagaagctggtgcggcgctacaagctggcgattgccacggcgctggccatcctgctgctgcagggcctggtagtgtggagcttcagcggcctggaggaggacgaggcgggcgaggtgctccgacggccgggcgggcgggcaggccgggcgcgggggcgcgcggggtcctggcggggctgcgggcggccccagccggggaagtggggcacgggccgcgtgcgtgcgtgcggggcgccggcggtcgcccagagcggagcatccggcccccggcactcccttccccagcaggcctagggagctgcgcgcgggggcagtgcgtgacctggagacccgggccctggtggattgggagtcgggcggggggagcaggtcatgctagggtggtctccggccaagggagcgatgaaggtcaggcgcggcgagcggggctgggaggcggggctgggcccgaacctgctcggaggtggggagccccaggccaaactttctgaagttgggagggggcggggatatgcgcgccgtgggcggaggagtagggccaagggactcagggcgtccttccccagctgagcccgaggggcagcggccggtgaggaaggggagctcgggggtggaattcaggcctgggacaaagtgtgtacccgggaactgaaggaacagggagtgacgccgaaggagagaactggagtattcccgaggtgtggcttcctcagccgggggtttgaagaacctggatgggtctccggagggcagggagaggaggaactgagctggtgagttggcctcaggaccttagggaattagggaggggccctctggctttaagggaatggggactgtaacagagccccagccgcagagcaggggcaaccaacagccgtctcagcccccaagtccctgcctcgagggtctttctccctcttccccgatgtggtttcagcgggaggctcagacacctcagcggtgtggtgaggaagggtccattgggtctgggttcgtgctgcggagatggagaggacaggccacaccacagccctaagctgtggcccagaggtcaggacctccctgcccccagcgcccctgttctgctgcctccagggctccgggtcagagactctatctgctgctgtcctccggcaagccccgatacccgcgaccccttaccgcatctcgccagtctggaaggcctggtgtggagacagaagagctgcccttgcctttttttgggagaacccagagggtgggatggtgatgggggctggaacagagtcacatgagaccataactccaaaaggaggtgggggcgggggtggggctggctccgtgacatccgtggggtgtagacctacaagtaggacaagcaagtaggagagtgtttcaggcccagtgtaagaagactgtttgggcagatgggacattccaagatggaatgggctgccaaagcagttagggagccctctgaccctggaatatgtgaccactctgggctaccgcccccatcccccaccacctcctcctccagcttcctggctgaatgaataggggaatcctgggctggaatgtttgaaaaagcttgtgcggtccaggcacccattgctgcttggaccccctcagctgctccctcacctgactctggggttgccaggcagcataacggggtgcatgggaaggtgagtgctgaagctggaccacccacttcaccactctcttccagctctgaccctgagaagaccaccagcaaatcactttgcctcctcccttatccttatcagtatccctcctcaagatggggataataatggcacctcccgtgttaggtgattataaagattaagtgaaaatgatgcctgtgaagcacttgcaggagttcctggcacatgctcagctgtcagtaaataaataactcttattatcccagcactgtgcattgggaatacgattcattcattcattcattcattccacaaataggtgtgaagtcctactttgtactagacactgtgctaatactggggatacaaaaataaaatagatgaggtctctgccctcatggacaggtaatctacagagagaaacagacagcgaaaaggaatttaatagaattacaaaggggttggcttagatcagggggtcaggaaaggcttctcacaggaagaggtgggcaggagagttcaggcagaaggcctgaggagaatgggcttagctgggcacccttgaggaatggacaggagggtgtggtgctttccctgaaagaaggttccattctgtgcggctgaaaggaccagagcaaggggcaagggttttattctaagtgcagtgggagagcactgaaggggtttaagcagcacaggattcagtgtgcatttaagacgtgcactctgcccatctatggagaggctgagagtggatcccagggatggtcacgaacctccagagagccactttatagtttccaaagcttccacaaacaccatctcaccacttgttttaaatgcagcccgagaagtcaaaggaggtggggtatggggggagcatttctgtgttcaccctttctgtgactcagagaaggattctaaggtggagctacagagccaggaagtggcagaggattttaatcgcctccttggaggagaggaaggagcctctgaggccagaatgtatcccagccagaagtcagaggaccattccctaccctcagtcatcagaagggctcctgacctcaggggctgctgggggcagcctgtgaggggcacaaggctggggctgtgatgacgatgctccttggacatgcctggaagggatggaggtgggggctgactgcccaccagggcctctgctccctcactgctgcctcctcatcccccagcctcctctgggattgtccttctcagggtcagccagctcccactgcagtgcagggaccaacatgcccatctcctcccacatcctggcccccaccacagccaacctggccccgtgcctcatgccctgccctcctgaccagcttcctaactcactgatactggcttccactcggagagcctacagctctctgccatctacccacctaagcttgggaatgtctttctctgcttgtgctctgtagccagctcacatgtcaccaggctgatgcacactcagctcagtggggctgcatttacctttcctagggattccccagcctgtggtgccctccccagtgtgggtagagaatagggtctgctgcctcctcttgcaggtatctcttctcggatgggaatgggcgcccccagctcccactggccacctttaagagatcagagggcaaccgggcactgtggctcatgcctgtaatctcagcactttgggaggccaaggtgggagaagcgcttgagtccaggagttcgagaccagcttggataacatagcaagactatctctattaaaataaataaaataaaaagatcagaaggctggctgggtgctaggcacagagggcatggatgtaggcatggggctctggcctgaaggtagctgtcagcctgacagcatgaggttcctgatgtgcccatactggtagtgggtagggtgtgggtagggtagtgggtaggttgggggaagtcctggggaggtgaggagcacagagaacccaacccagccgagtccaagatgtccaggatcttgggtctctcttgacttcacgtttgactaatttcctcctcccatctgagtaatcataatgataaagatagcagcattgggccaggtatggtggctcacgcctgtaatcccagcactttgggaggctgaggcgggcagatcacttgaggtcaggaatttgagaccagcctggccaatatggtaaagcccagtctttactaaaaatacaaaaagttgccaggcatggtggcacatacctgtaatcccagctacttgggaggctgaggcacgagaatcgcttgaacctgggaggcaaaggttgcagtgagctgagatcacgctactgcactccagcctgggcgacagagtgagactgcgtctcaaaaaaaaaaaaaaaaaaaaaaaaagtaccagtacttactgaatgctgtgcctatgccaaaagctttgcattcattcattcattcattcaaaaaatactaaggccaggcacagtggcttaggcctgtaatcccagcactttgggaggccaaggtttgtggatcacttgaggtcaggagttcgagaccagcctggccaacatggtgaaactctgtctctactaaaaatacaaaaaattagccaggcatggtggtgcgaacctgtaatcccggctacgtgggaggctgaggcacaagaatcgcttgaacccaagaggcagaggttggagtgagccgagattgcaccactgcactccagcctgggcaatagagtgagactgcctcagaaaaacaaacacttactgagtgtgtactacagccagacactctcctaggtgctacgactatgtcagtgaacaaaacaggaaaaaagccctgcccttggggaacttacaatcttctgaggagaaagacaaattaaaaaaacagtataaataaatagtaggatgagaggaaatattgtgcgatggtgaaaagcagaggaggagggagggctggcactgtaaatccagtggtctgggtggccctactgagaagatgccatctgaacaaagaattgaaggaggcaaggagtgtgagcagtggggctatctgggggagggtttgccaggcacaggggatagtgggtgcaagggttggagccaggagtgccaggggggatgaggggacgcagagaaaaccactgtggctgcaggagagtgagcatgacaaattcccagatgaggtcagagaggcctgggtggagaagggggcatccagacagctcatggagcctctgtaggctcctgtaagggccttggtttttatcctaagaggggaagccactggaggtttggagcaggggagtggtgaaatgggattttaagagttgtaacagaaacaccagctgctgtgatgagaacggaatttaggggaacaagagtaggagctggaagaccagggaatccaggcagggatagtgagggaggtgttgagaagggatggcattccacatgtattctgaaggtggccccgatgggatttactgatggagtggatgtggggtgtgagggaaagagagtcaaagatgactcctggctgggcgcagtggctcacatctgtaatcccagcactttgggaggccagggcaggtggatcacgaggtcaggagttcaagaccagcctggccaacttggtgaaaccccatctctattaaaaataaaaaattagccaggcatggtggcatgtgcctgtagtcccagcctctcgggaggctgaggcaggagaatcacttgaacccaggaggcagaggttgcagtgagccaagattgcgccactgcaccccagcctgggcaacagagcaagactctatctaaaagaaaaaaaaatgattcctaaaagtttttggcctgagcatcctgaaggatggagatgtcattaactgagatggggaagatgaagtaggagcaggttggggtcgaagagcaggaggtacttttgggcttgtggctttgagaggtctatcgagctcccatgtgagatgtcaaggaggctggtagttaaatgcctgaacgttcaagggagctatccaggccagagaggtcaatctgagatttgggatggagttcagaaacccagagactgaaagtcacttaggaagtgaaggtgctaggacaggaagggcccccagatgtgccctgggaaacaaggaagcaccaagaagaccataaggagtggcagtggagagaggagaaaagccaggtgggtatcctggaaagcaaatgcggagggtgcttcaagcaagacagagtggtccattaagtcacgctgctgaaaggccaagaaagaagaggacttagtcctggagaacttgtgagcatggaggggaaggcccgtgggagagggtttacaaggctggagacggctctccctagctgcagtgtctcatgctcagttgttactccttacagctgggggagcatgctcagagaagttagggaactgctggtgagttggcagagctaggcccagagccctggaggctctagagtgttcacatggtggcccctgttcctccgtccattctacatctcatccatcagacaccagctaggtgtccgtgtgtgccagctgctctgctgggccctggagagatggagctgacatgtctctcatcaaggagttcactactagaggaacatccagggccttggagcccagcccattccactgcagggcaaatggaatggctgcatgccaggggccttggagctggatctgaaagcatggatgggatttggtcaggcagggcaagtaggatgggggaacggaggaggaggtggctggacatgctgttcagtcaccaccaggccatctagggaagtgcctggatttgaggagaggcagcaggtaccagagcacttagagccaggaagcaggggcgcagcagcggtagaggcgccccgctgcagggatcccttcaaggaagaacctgctgcacatgcagcgaggtgacagcctccagctgtgggcaccttcaggccctgcttcagctttcaagccagggactgagtgtggaggtggctcagggctcaccagctccaggcagtacatgtgccggagttttcccaggagccggccaggacttcctcgaggctgtgctggaggtggacgctcttcttgcccctctccttgcatggccgtctcctttgcggtccaaagcctttccctgccagctcctgccccatcgttcacaggggtacccgcagtgaatctcatgccctctcactctgtcttgatctgcttcctagaggacctaagcagtattggggtctcaggcttcacctccatcatcccccatgggcactcctccttcgctgtgaggtggcctcagtcttcccacatggaaatgctttggattcatctggaagttagagtcttctgaagaccactgtctccttccagccctcggtgggagtgctgggtcttaggtggacacttgtaccctcggtggggtctttgcacccttcccttgggacacacgtagatatttattttaacatctgctgaaaaaggaagtggtatctgagtccagaacagaaaaccaagcacactgccatgtaatctgagagccagtgggggacgggggtgttggtatgatggagggaggcccagtgcgccctcagtggctggccagggaggtgctcccatggtggtactgattgtgcggagtccttaggtgaaaagcgcttctctgggtaaaaggtgggcaggaacatctaggtctgagggtgcccccaaccaagatggaactcaaggaacaggaggaggtgagggtctgccccagtgatgtgtctgcatctctcttacagaaaggaaggcagaggaagccacggccactggaccctggcgagggttccaaggacacagacagttcagcagggcgacggggcagcacaggcagaaggcatgggcgctggcggggccgtgctgagagcccaggagtgcccgtggccaaggtggtacgggcagtaaccagccggcagagagccagccggcgggtcccacctgccccacccccggaagccccaggccgccagaacctgagtggggcagcagctggggaggcgctggtaggggcagctggcttcccaccacacggagatacagggagcgtggagggcgccccccagcccacggacaatggcttcacccccaagtgcgagatcgtgggcaaggacgcactgtctgcactggcccgggccagcaccaagcagtgccagcaggagatcgccaatgtggtgtgcctgcaccaggctgggagcctcatgcccaaggctgtgccccggcactgtcagctgactggtgagggacaggggtgctccagcccttcccaggcgggggcaggggggtggcatggcccggatcctcacccctatctctctgaggaagaaagagccaaggggatcctacctccctgcctaagtcttcatccagtgtacttactaagtggcagaggcagagtggggacccacgagcatggagctccaagtctaggtttcttcggaaggcaggcagctccctcttcccatctcacccccaccctgtgacctagggtgggcctcgccaacgcctgtcctctgctctcagggaagatgagccccggcatccagtgggatgagagccaagcccagcagcccatggatggccccccggtgcgaatcgcctacatgctggtggttcacggccgcgccatccgccagctgaagcgtctcctcaaggccgtttatcacgagcagcacttcttttacatccatgtggacaaggtactgtggtggggagaggccaaggggtctgggatgagcagagcagaaacagaaggttgcagacagacagagtctctgacctggcccaggtagcctaggagggaaactgaggccctgaacaggggagtggcagcacgagccagctcagccgcttaggggctggagccctgccctgtgctttcctcgtcttgtgtcccttcactctgtcctggggtgggattggggatggcgataacactggaggctagctgagtgtctcctccccaccagcgttccgactacctgcaccgggaggtggtggagctggcccagggctatgataacgtgcgggtgacgccctggcgcatggttaccatctggggcggggccagcctcctgaggatgtacctgcggagcatgcgggacctgctagaggtgcctggctgggcctgggacttcttcatcaacctcagtgccactgactatccaaccaggtgtggggatggggctctgagtcctctgcatgggaggggacccctgtctgggcacctggggttggagggctttggtggaccttctctgccccataagcgtaactctgggatccgccctgctcagacatgggcccctgggccccagctatgttttaggggaggggttggtgtaagatgatctaagaattgagcatgataggagatggggaggaggaggagccagaggtctgtacctggtgttctgggtcagacagcaaggggcagaggaaggatggggtggtcttcctcaggggcctctggtgctcaccaccccagacatcagccaggggtagggcacatggccagccagcaatcaggcagagaagaaaagccagaaggtccgctctgggccagtgactgagcaactatctcatgtggctgcctgtcaccccattccttcaccaggaccaatgaggagctggtggcattcctatccaagaaccgggacaagaatttcctcaagtcacatggccgggacaactccaggtgagggggtggggaaggaggccctggccccagagtcttgtcccaacccctcccacacagttgggctcggtggctccagccctgggtttcaaagcctccacaccagtcacaggttgaggagtgttggttgccaggcgggtgaaagagcttagaccccaccctgcaggatccccagccatggcctctctgctgcccacaggttcatcaagaaacagggcctggaccggctcttccatgagtgcgactcacacatgtggcgcctgggcgagcggcagatcccagcaggcattgtggtggatggcggttctgactggttcgtgctgacacgcagctttgtggagtatgtggtgtacacagatgacccgcttgtggcccagctgcgccagttctacacatacacactgctcccagccgaggtgggtagcccagcaggcatgaaggccagggagggcgtgggttgggctgcctgcagctcaccttccactctcccttgctgcttgcagtccttcttccacacggtgctggagaacagcctggcctgtgagaccctcgtggacaacaacctgcgggtcaccaactggaaccgcaagctgggctgcaagtgccagtacaagcacattgtggactggtgtggctgctcccccaacgacttcaagccacaggacttcctccggctgcaggtgcttgcccgaggccccaaggcccctggctaggtcttctcccctggcttttcaccaggaaaatggcagggtgggccagtaagagaatctggggggccacggcctgcagcaaccctcaggggtctggggctacaacagcagcaggaaaagccgcaggaggctgagctctaggcagtgctgaggggccagccccaccatgccctctggggcttccagagcccttcaccctccttgcctctcccactccagcaagtctccagacccaccttcttcgcccggaagttcgagtcgactgtgaaccaggaggtgctggaaatcctggacttccacctgtatggcagctacccccccggcacgccagccctcaaggcctactgggagaacacctacgacgcggctgatggccccagtgggctcagtgatgtcatgctcactgcttacacagccttcgcccgcctcagcctgcaccatgccgccactgctgcacccccaatgggcaccccactctgcaggtgagacccccttctgacatacagcaggcccttggggtgtggtgccctagggggaggccaaccagagagtgacgtcccctgcccacaacaaggccccagtctgaagcagggaaaaatgcaaataccgaaaagacggctagagccaggcatgcaggtgctgtgggggtgagatctggggaaaggaagtgcctggggatgggactccccagagccccctccctgggactccaggccaagtcaggtgtgctgatggcatctccctttctccctgctggcaccttaggtttgagcccaggggcttgccgtccagcgtgcacctgtatttctatgacgaccatttccagggctacctggtgacgcaggcggtgcagccctcagcccaggggccggcagagacgcttgagatgtggctgatgccccaagggtcgctgaagctgttggggcgcagtgaccaggccagccggctccagagtctggaggtgggacaggtcccccacttgctttctcccaacccccacccagacttggggtagtgggaagagagggacagacaccaagggaggggtaaggttatttttcccagtcatggcagccatggtgatgcccccatgcagacatcctgtgtcaccccccagcctgtgcacactgaggagcacctcctggttggggtatgcagaggacatgcagggagcagggagggaattatcagttccactacaacacaagcccaatcttccagactacagagatttcgcctagaggggcagggacattcgagttgggccatgaaactacacttctgagtggctcctcatagtctttttttttttttttttgagacagtctcactctgtcgcagtggcacaatctcggctcactgcaacctctgcctcccaggttcaagcgattctcctacctcagcctcccgcgtagctgggactacaggcgcgcgccaccacgcccagctaatttttttttttgtatttttaatagagacggggtttcaccatgttgaccaggatgatctcgatctcctgaccttgtgatccacccgcctcggcctcccagagtgctgggaatacaagcgcaagccaccgcgcctggcccctcctcatagtctctttctcagaggctttggcttcatgtgggaatggtctctgggcaggactttgaacctcatccctgccgtattgtccccaataagggggactgacctccactgcctagcagtcagaatggaagcctagaacgaatctcagagctgggagagatattaaaggtctcctagtctgaccccttcattttgcagatggggaaactgaggcccagaaagagacagtgactggcctgagattacacagtgagaggcagcttcagaggagggagaaggacctttcccccacactcctgcccagctgcctctctctctacaggttggcactgattgggaccccaaagagcgtcttttccggaactttggggggttactggggccgctggacgagcctgtggccgtgcagcgctgggcccggggccccaacctcacagccacagtggtctggatcgacccaacctatgtggtggccacatcttatgacatcacagtagatacggagactgaggtcacgcaatacaagcccccactgagccggcccctgcggccagggccctggactgttcgactccttcagttctgggaaccgctgggtgagacccgcttccttgtgctgcccttgaccttcaaccgcaaactacctctcaggaaaggtaagcgtgcagttctcaaatgaggcccagaagccagacagaataggactcgccagagaggtgacctcaagaagccaaccatcagagctgactcccatccctagagtcagggaagcatggaagggctggggccttcatcttctttcctgtagcatgcagggtcctgcactgcagtgtggtggaaaagggagctttacagtcatgcacacttggtttggaacataactctcacaagttcattggctttttgtccttggaagttacctggccttcctgggcctcagtcttagcacgtgaagctggaatagtacacctatcagggacctcctggttcatgcaacacaaatccactcaacctagcttgagttaaaaaggggagaagactggaagaatgcagaggtctccttcacaaagctaggaaatgtctcaggcctcactgtgaaccagaggtgctttctccatctctctggggctatcttgttcctcatcctgtcctgtctctatgcattggcctcaggctctggctccccatccatggcctctcagtgcaacagacactgaccagagacttttagtccccaggtttcacattcttgggacagcaaatctgattggctatcccagtccactgtctggccaggtgggcagggtcatgtggctctctgcccatttggctgaggctaagggagcaggctctgaacagagacacaggctgggcaaatttcctgcaagggagggcctagtataagtaactccccctgggagctatgagggatgagcctctggagggaaagtggccggtatgcaggaggtgatcaattggtaggtgtttccttcccccaccacgtcctatcacaagaaggtggttaagaggtggggtaccctagaggaggagggggtgctggtggggctgcagcagatccagggcaggcaagctgtgtcccccgcacacctggacctcccagtcaagggaagaatggcaacaatgcacagcaggtagggacaggggctgcgcctcaaggacaaagtcagaggaggtgctctaagccaaggggacaaagctggccattgtctgtgcatgaagagctgaagtgcccgagtacaggcttctgagggctctaggagccaccaatgatggtcaagaaagggtatgggacacaaaccagactgttcccttttctaaagtgccttgaacccactgctttactgcatcctaaagttgggaatctaaggcttactgccttgattttataaaactcagttttataggcacagaaagtcccttggattagcccaaggtcattcagcaagctgtgactcagaagtagggctgtgacaggaactggggtacccagacccaactcctgggtctggcctccacggagtctgttgcagggggtgtgcttactgcctgctctgcacccacagatgatgccagctggctgcacgcagggccaccccacaacgagtacatggagcagagtttccagggcctgagtagcatcctgaacctgcctcagccggagctcgcggaggaggctgcccagcggcacacacagctcacaggccctgcgctcgaggcctggacagacagggaactgagcagcttctggtccgtggctggactgtgtgccataggcccctctccctgcccctccctggagccctgcagactgaccagctggagctctctgtcccccgaccccaaatcagagctggggcctgtcaaagcagacgggcgactcaggtagcagggccccagccagtacccgtggaggacccgggaaattgcaccttacagacagtggaggggtgtcccctcccacaggcaagaaccagaggcccaggctgcacacccatttcagccatcaagaacccacacagacggcagggaaggtggacacagtatgaactactgctgatgtctctgttggggatcagagggctggcgggaacgcgagaagggcaccagcagcattccacacccagctcttcctcaccttcctgtctagtttgaatttcttttttttctttttttttttttttttttaatttaaaaaggaaaatgggtggttgggagagaaactagaacagaagatgtgcaatagggctcagagcagccccaggaagtgggccatgtctgtggggagcaggggcttgctgagcccacctgctattgttctgcacgaggctgggcctgcctcactctccagggcctcatgccccattctgggcctgtggtgctcgtggctgaggctccacagggctgcaagtgccctgccaggctctaaggcccgaagaacaggtgatatcgggggcgctgcagagctgggctctagcaggacagttcttttgtagccaggggaccctagaagtggggtggggcggctccagggctttccagcataccctgcccctggatgggaaaggcagggtcagggcccactgagacccatgcagagtttccaggtgtgcactggaagtgaggtcacatgagcagcgtgggaagaagactctgtcaagactctcagaagaacctggagtaattgtgcctgaagctcagcgtgaagtctgaaatatgcaacagaagaaatatatctctatctctctactctgggctctgtgtttttcctcctgggtgtcaggaagccatcaccattcattgggccttctccagaagtcttagctggtactttggtagccttgagaaggtaaagatctcattcctccagattaagaacagtttagaatccacccagagggactcaagaacccatctagcctgggtgcaggggttcacgcctgtcatctcaacactgggaggctgaggcaggaagattacctcagcccaggagtttgggaccagcctgggaaacagtgagacctcgtctctacaagaatttttttttaattagccaggcgtggtggcgcacatctgtagtcccagctactcaggaggctgaagcaggagtttgaagctgcagtgagccaaaattgcaccactgcactccagcctgggtgacagagtgagaccctgtctcaaaaaacatctaatccagctcctttttctgaggggtaaacaggcccagagaggctcaaagacttcttctttgccacccagcaagccaggggaccagcaggacctgagcttagtttgagagccctgacccagcactcccacccccaccaccaggccaggctgcagcaggtgctggcttctctatccttggccttagcagggtccatcctagaagactggccctgccacatggggcaccttcaacagaggcaatcccagccatggcctggtcgttatgattggagctttttcttttcggggcaggagcagcagcagcctaggtccctcgtcactgtcctaggactcatgttgaaaagggttgtccatcctccctccctttcccaagcctcctctccccctcccactctcctaccattgacagccggagctcggtatcagtccttcacagcttgcttaatgtgggagcaagggtgaaggtttctagacctctaaagtcaccctatcagccagccacactgagctcagcttggggaacaaattcctgcccaggctgccacatgtcaagttctcctagttgccaggagggggcactcctgacaaccaaccgataacagcactggggtttttgtcagctgccgtggtgctaaccatgcctgtagtatctcaatccttacaactcttggagggaggcatttttattatcatcatttagcagatcagaaaactgaggcttagagctgtgaaatgacgagcccaaagtcacagctaactatttgatggtggcagcagccttcagaaagaggcaggaagcctccagagccactcagtcactacactctccggctcgcataagagcctggctgggcaggtaagcaggaaggagctaatggcaagaattcgaaggaaaaggtacttaggttcagaggctaagataattcgttttttctggctcctgttttagtgaacatctgaagctgtaccctggttctccagaatgttgtggtttttgtttcccaatatcaactctcaggtcaataaggaggaaaaattaacaactaggttcagcatattaggcacaggcagtaaatattagaacacttagactctgctggccaagagctcacaaactagcctgtgggtttaacctgggctatggctgtgctgtgttaggctagcacaacggttttcaaagtagtagtagtatttttagagacagggtctggctctgttgtccaggcacgatcacgatcatagctcactgcagccttgacctcctgagcgcaagtgatcctcctaagtagctagggtcacagatgtgcacgaccatgcctggcatgcatgcattctttatttatttatttatttatttatttattttatttatttatttattggcagaacaggggtctctccatgttgcccaggctggtctcaaactcctggcctcaagcagtcctcccgctccaacctcccaaagcgttgggatgacaggcatcagccactactcctggcctcaaagtaccattaaaaaaaaaaaaaaatcttaggtaacacatgcactcgccgcatccctgtccttctccaccatattagatcaggtcgtagttccccattattgtcacctgctgtaaacatttggagtttacattcttcaactcaagtgagtcgtgatcctgacagaggattctgatttaacggtctgaggtggcaacccacagtggtatgcttttaaagctcctcaggcctttctaacaagcaggcaggcagaactagggaagcgtaaccccacccctgctgctctggcaggcctgtcttggccccactgagttggaagcactgcaggacccaggaccagcctccaggactcctcctgacaggttcagagggcagatttgggggtggaggtgctcctctcccattctctcccctgtccaggtcactgaggtgagagctcagctttgctgcctgagttcctggcagacagtgttctctatcccccacctttctgtagggttagctcagcctggaggcttgggttttttgaggtttctttgaaatccactcctggctgggccactggggtcaaaatcaggatttgggccaggcaggacacagagtgggggcggggagcggccaaaggcaggctgggcccccagagctgcacaataactgctttggagggaggaggagagcctgggcagagaggcttttgtatttcatggcctggcgtacccagtttccagggcaaccatggacaccacggttctgttagaggtggaagccaagaccagaagacagccaattaacatccagagcccagttatctgagccaatgggaagtggaggtgggcaatggggctgggagggatctgggactgagaagtgcagagatctgggcgagttggagtcccactggctgtcaggttcagcagaagcagggcctgttccccccaacccctgctctgaaggttgtagtgggacactcatagctgccaggcctgcagaggcaggagaggctgagctcctggaaagctgcttacagatgcccctgctctgaatgaagctgttcctctgggccagggttcccagggaggggtgtggcacctcggggagggtcagccctgtggccctgctggctgccctcaagactgatgccctttcttggcatcccctgccactgcttctccgtgtgcagacatcaccatggacaacagcctcctggccatagtcgtggccaccagtgagtacctactgccattccgtgtcccaggggtggggcagaggcacctttggcccctcactgtaggcaaagcccagattcttcatctatagggtcacctcaagcaacagccctccccagccaagacttgagaagtatgctgcacatggctggtctttgatccctctggtcccttccctgtgccaggtcctatgatgccacaatctttggtaacaagaggggctgggcaccaggagctgttgagctgggctcttgggtcctttcctgcctcctcagatccagtttctcagggtatctgctccatcccctccctttgtgtctctgtaaaatctcccttacacacatcaccccctgggctgcaggcagggaagggacagggctactctgctccccctcacaaatctctgccccagggacttgatgccgtagcaaaaagggagctgcctgcacctcagtttgccttgcttgtcaagctggtatcagtaccagccaggtcattcctacaccagcttctggagtgaattccaatctggtgaggagatgggcctgcacatgctgggtccaggctgccccctgacggtgcctcttgggggaaggcagcctcatccacagtgttcatcatggccatcctgctgctgctgctgctgcaccagcgcgacccccagtgctgccaggtcctctgcgcctgccacttcttccggagtcccagccaatacgtaagcaccccgatccaccaaccccttgccttcatgccccccacccccgacccaaatcctgacaaaagggcacctgtgctctggccaaggagaaacaagtgttcagtatggaaaagaaagggcctttggaatctttctctgcagcatccagcctgggttccctctgagtcaggggagcagtgtggaaagggttaataacatctaggcccctccctgaccattgttaaacataactcagtgcaaggagctgctcagtgaagacaaggtctttttccagctcccaggggaaagtgcagagccccgacttctggggaagggggtaagtggcaactacagcactgtcagtcctctccccagggacagcgtgccatatggcatcctgtatagaaaggaaacaaaatctgagctgcagccccccagtctctgacaccattccccaacactgggcaccagacaggatggaggggtagggacaggaggtggttttctctgactttcccaccaaaggtcatgagacctggctaccagacagtgacagaatgagctactggccagaaaggagtggattctctttacaccctagtgcatttcagaaatgctgagggtctgagctttgtgccttggcccaggtggagaggattaaagggatggagaaaggggcatggagggaaataaagggtttggaatctgctgtcttgcacactgaccctgagcttcaccttgagctgtgcttcatgatcccagggctgcccgcctccctacttcagcaccatgggatgccacaccgaggtccagccagtggaaaggagccgagagtcccaagggatacaagtgaggctccctgggcctgccacctgggatgggggaaaaagtgtgtgctggggttctgaagccaggcaagggacctagcgtggttaaggggactaaaaagaacgcaggggaggggaaggatgggatgaagactggagaggcttcttggaggagagggaggagcgcaatacccctgaacttaggcttgctctgcagaagaggacccagaccgaagctggataacactggtgcatgcctccctggctcccttggctttttttggtcacagggccactcccaggggggtgaggtattctgtgtggggctgcccaggagccaccagctgcccctgtggcagccagctcgcctgcccagctatgagagtgttcgaaagaaggaccggcagcagcagattcaccagctgattgcacagagcttcgggctccgggcctgcagagaggtgaatgtccagccttctcagccctgggtgccctgggtaaccgagcttttcacatatcgcattttaacacacaatacccaattagaggccctggggtcaggaaaaggaccactagtggagaactcaaggatatgactggagaccccagttcacctctttgtgtagatggtgcagaccccagcccaaggaggcctaaccagaggggtttccatggagccaacatctccagcggagatgcagaaagcaacagtccaaagaaagggtgttgcatatatgggaagagggcaagaaagtggctaatgcctttgctctcccatctctccagctgccaccaagctatgaggaagccataaggtcactgcctccaccaccggccagctgtggctctactcagtcatcccaggaagcagccacctgccctgctcaggggaacaccacagtgtaggagggagcaaccacctctgtcctgcccttcccctttctccaggagattggaaaggagagcactgagcctgtggaggtagcccccatcaatctcccctgcctaaagactaccccagctgggccttggtacctgatgcccccacacagggtgccaaagtaaaccccacaaaccccaggtcacctctgtcaaggacctgcaggaggtgaggaatctagggtcatgtcctgggaaaacaagatgacatgttcaaggcagaactccagaactgggaggcttctctgacctcaatccctggagtgtctaccttcagggcacagtagagtccctgaaagaagtcactggacccaacagcccctctctggggctgtagccaacaccacctacctccaacagccaggaatgaccatccaaaatgagattttcttcccggcccctccactcaaagccaagcctctaaaggtcctggctgggatgacaatagagtggcctgaccccagcccactctaagccctcaccgagtattcctgaagccagattctttgctactgtttatcgtttgagataaatcaagaacgagaagagaatgtgggcttggtgcgcctagctcttcaggtgagcgggaagaagccatttgtttcctactctgccctaccactgcaaagacctcggtagtccagggcagttggggcctgactgagcctctcagaagcatctcctgccatcccacaagctctctctctgccctagacctggacaggcagggaagagggtttcctgtggccacctctggggctgcagccccagctcccttggcatgtggctacaggagaacatgactgtgttgcttcctttactggctgctcccacccctcctcccagggcccagcccttggccttttttgggatctaagaggagaagcagcaatgacaccctcaagcacaagctcccctcctccccctctggaggacagtgccaaagcaagtccctcctacaaagtccccccttctcatttcctcactcagatatgttctttcctgctttgaggctccccgttggtgtgcactagagaacctgggtaaggaccaacagatcaccaggcagttccatccaggtgtgtccctaaatagcatgcgttcatgacgctggctcactttatttttggccccaggtcaggtctcccaaagggtttcccagcagtcacttcagagtctcctgcagagtcaccatcaagcagacctcttcctcgggaggccgtgtcgccaccccaacccttgacttctggtatcaccatctcctgtcacctgggctccagtctctgtccgatggcctcaacaggacatcaaagcatagctaccagtttgaaggtgccctcaggcttggcaggaaccacgtggacaaaagtcttgtagagcacagcacccttgggcagcctggtgatcagatccacagcctccgtgtttctgggatgaggcacgtagacctccttagtgtagcggactatcccctcttccagggcatacagacatttattcttcccaacacccacctgcaacacacagacctggtcagctggtcagctggtcagcgaggtggtccgtcccagaattttgggacagacttctcacacagagccgggccctggggctgaaagggtgatcagagagctccatctcaggttccctttcccactggctagcacgtccaaaccttctgcttctttattgactcataacaaatgagggaaaagaaagctccaacagccaacatgggccactgctcagtcccagggactgttacctggagccatgtctatgcagctggtcagaagccacactgcacaaatcccaaaacccaggaagatgccctaaatcttcacttagacttaaacaacactagaactgtcatattaaaacactagtttgatgtaaattttcatttagatagtgatctataaagtttaggctctatggaaaatataaaccaaagctatatggataatgcatatgctaataaaacaatcatactactgcattagctaatacccatgtaagccctttaatacacattaagtcatttaattctcacctagtgaaagaggtattatttccaacgccacttttcagatgtgaaatatgaagcagagagattaaactgtgttgtatatacagtttttaaccatattttttagctttttcttttagaacttcaggctgggtgtgtggcaaattttacccaggtagtccagcattattctctgtctctctgattaaaagaatgggctctggagccaggatgcctggttcaaataccagcactgctacttactcctgtgtggtcttaggcaagttacttcactgtgcctctattttttcgtctgtcaaatggggataatattaactattttacagggtcattttgaggattaatgctcaacaatcataaagggcctagaatactgtctagctcaaaatgtgttagctttgattattattgttgacatagccacacatctaatgtcttaagttctaaaaggtaaaaagctactacatacataatcaattcacatacaaattagcatctttgaaataaatacaggttactatcaacctttttgtacctactaaaattatcgaaaaaggggtgggggaggggaaactgtttacaaaggcaactaatatttaaaataatgtggagagtacagtatcgttatgtctctgtaacaaagaactgtcctaccctataaaaatgatgccaacttgctgaaactgaaatccccacctggtatgaacctaactcctggcacactgaattctatttcattaaattcaagctatctttcaaccatctgcaagtaagtttatacaaaggaagaagtcttagaataatgaaaaactaataaattgaaattagtttcccaagactaaaataatattttaaatcaccaggtatcttgtcctccaagaactgagggttagaaaggagaaccaagaataccaggccaatgcaacaccagggcaaatcatagtgatctgggagttaggcagacctggtgcaaatcccagcagtcacttgctccttccaccccgtctaggtctctggcatttcaccttacttacagggatgtggtaaggaagaaatgagatcgtgtaggcatgggaatcagcacaatgcttgccatttggtaagcactcaatacatgcaactgttattaccatgcttaggggcaaggagaggtcaacctagaaaaggaaaaaggggggcagcaacggagcaactcacatgggcacctgggtgccagcggaaatggcgctgtgttgcaatgatgttcccagcatgaacatagtgacctagaagagaagtccacagtgactggggcagcatagcaaactaccaagaaaacatgatggcccaaatgctgcacaccaacctccaagcctgcccctggccaaaaacaactcccagacagtccaacacaagcagcgcaggatctgccacccagcagctcttgtctctaattgcatggttatggctcacacccacccactcgatgacccttcctcaggtcttatccgttcctttaaactggagccaattatgatggtaaggaagaacagggccaggcacacgcagggttcttctgctctcctaaggaacatgaggacagggtgcagctaggaaggggaagccaaggcacatcctcaccttccattttcttaatgccttggcgtctgcctgatgactttccaccgaggtttttggagctaccacccgacttcttggatgcgtatctgacagcaagagctgtagccggagtggggcttagcaaggatgtaactgcagagaaaacagaaacattgttcagacagacaggctcaaactatttctgcctcaatgggccacatgctgatacgtgagaggcggtggggagatgagaaagctgtgtcaggggagcagaagtgccactgagtgtattagttctcagggaatacctctaagtccttggctttctccttttgggggagggggcgggggagcagtgaaacacaaatggaaaaaaataaacatcatgtgttctgggttctgacacattcagtctaaatgtgctgaggagaaatggacaccagagagctgcctgcttcagaggctcactcaccctcatgcaccacggaggggccagaacagacttggggagcccagtacatccagaaaggcttcggtttcaggctcacccacgactttctttcttttttttttttaaagacggagcttcactcttgttgcccaagctggagtgcaatggcatagtcctggctccctgcaacctccgcgtcccggattcaagcgattctcctgcctcagcctcccaagtagctgggattacaggtgtacgccaccacgcccagctaatttttcgtatttttagtagaaacggggtttcaccatgttagccaggctggtctcgaactcctgacctcaggtgatcccaaagtgttgggattacaggcctcacccatgactttctcagctgtccactcatccactgctcaccaaatactagtaaaccaaaaggatggctggcctaaaagtggctcccacagggtcctggccatttcagaaggctgggccctttcttctcaaagcacatcaagcagaggtccaaccatgacccacacactgcccttgttaatctgacctctccatactcattccaaagtgctcaatagcattcatttgcagaagtaaaatgaactaaaattcatactaagatggtagtcccttgctgtatgacaagcctaggggtgcaactccttgcctgcaggtctccagacacagccatgatttaaggtccatgccagtgtctttagagaagccttgtgggtctctggagcctataagttcagagttcctgaagcctgggtttctgacatttccatgacaccagagactagctggggcaaaggaccagagataaggactcagaaagacaacatgttaaaacatgcccggcgccaggatctacctacctttaaacatctattcattcatttacatacttactaagctcaggagctgggcttttactttacttacattatctcactcacaaatctttgctcttcaccctactccccatcctcctcctcaaagtaaatggtaccaccattcatccagttgcttaggcagaaaccagagtcattgcagattccttctctttgctgtcctcacatattgttcaccagcaagctctgtggatgctaactccaaaacagatctcaaattcatccgttttcctccaagttcactgccaccacaaacatcttggctaaatcatctctcctcagggctattacgactttccatttgatttcctcatttccactcctatcccctttaaatttacataagagcaatagtttgcttctcaaaatgtaaaactggctcaagtcactctcctgtccctcactctacacaggtctaggtctcctgtcattcttttttttttgggggggggggatagggccccattctgtcacccaggctggagtgcagtggtatgaacatagctcactgcaacctcgacctcccgagctcaggtgatcctcccacctcagcctcctgagtatctgagaccacaggcaagcgccactacacccagctaatttttgtattttttgtagagatggggttttgccatgttgcccagtcggtcttgaactcctgggctcaagcgatccgcccacctaggcctcccaaagtgttgggactacaggcgtgagccatcacgccccgcctgtcattctttaggttttaaatgttatctcctcagaagccttccttcaccgtccaatctaaaaaaagacacacacacagacacacattatccttcttcacagcacttgccagtctacatctactttatatgttcatttattgccttatgcaccagagagaaccgttcgggggctagaagccaagtcttcacgttttctgctgattttccgaacacctaccgccgtgtctagcacaaagtaagacctcaatctgctgaatcaatagattaattttttcaaccccaatatgccaatgttactaatacttctacagagaaaggacccacccaaatccccaaccgccaaggaacccgtccgtgctgctgaggcaggagaaagacaagtgctcttcaaacgccctcactcacggctccacccaggatgtgtcacgtgaccagcgacaccgtccctcaaacctggagtaccccacacacttcccctcgcatccaaggtcctccgcggggatcagtgtcacctccttccctccctgctggagctccactctgcctccccgcctcaccccgctctgactactgcgtcccattaccggctgtccgggtcctcagcgccaacaccaccgacgccatgctttcgatcactcacttccggtctcgaaaagtttctacttccgctatcaggagatctacttccgggccctgcgtggcagttgaaagagtggcgggagaagttgcaggtgagcgtccccggtcgcaggcctgcggattgggcagggcttccctcctgaacaccgctctgcagaatcttggtggctaaggtgtccaggagcctctgcagcggaccgccagcctgagaggcgcagagcttgtcgggcaggggcccgcttgtcccactcccctgatttgcagatgtcaacggaggcccagcgaagggtcagagatgaggccccctccctagtcattcaacttactctacttagccagctgtgtgccagatgctgtactaagcgcggtggatgcattattttatttaattctcactaccttataaaatgggtgctgttaccatccctgttttactaaggaagaaactgaggcctaggcaggttacatgtctccttctgggtcatacctacagtgttagtaaatgttcaagaaatgattagctttgcatatgacccagcaattctactcctaggtatatacacgaaagggatttgaaaacatacccccacaaaaacttgtatgtcagtgttcatagcagcattattcataacaggcaaaaaaaggaaacaaattaaatgtccaagtgatgaatggataaacaaaatgtagcatatccatacagtggaatattattcagtcatgaaaagcaattaactactgatacaggctacatcatagataaaccttgaaaacaagctgagtgaaaaaagtcaatcacaaaaggccacatagtgtatgattctatttatatgaaatatccagaataggcaaatgcatagagacagatttatggttgccaggagctggggagggagggaaaggacagtgacggcttaatggctgcaggaattctttttgaggtgataaaatagtgatgatggttgcacaacattgtgaatatactaaaatctactgaatgtacacttttaaaaggatattatgctgtgcaaattatatctctatttttatttttattttatttttcttttgaagcagggtctcactctgtcacccgggctggagtgcagtcgtacaatcacagctcactgcagccttgacctcccaggctcaagcaatcctcccacctcagcctcctgagtatctgggactacaggtgtgagccaccatacccagctaatttttgtatttttttgtagagacgagttctcactatgttgcccaggctgttctcgaactcctgggctcaagtgatccttctgctttggcctcccaaagtgctgggattatacgcatgagctaccatgcccagcctatatctcaatttttaaaaagaacagtttttggccaggtgcagtggttcacacctgtaatctcagcactttgggaggccaaggcgggcggatcacttgaggtcaggagttcaagactagcctggcgaacatgatgaaaacgcatctctactaaaaatacaaaaattagccaggtgtggtggtggggcgcctgtaatcccagctaggctgaggcaggagaatcacttgaacctgggagtgaggttgcagtgagccaagattgtgccactgcactccaacgtgggtgccagagtgagactccatctcaaaaaaaaaaaagaagaacttttgacatctccatttcaaacgtgaagataaacaaggggttggaggtgttaaatcttgttaccacctccccccattaaaattttgtaatggtaactctactttgtttatacttcagcttgacctggaaagaatttgaggaggattcctgttagattaccaggagttagagttccagattgaatgtgttggggccatgtcatatttctctgtttctgtattctctatatcttatatttatgtcataaagcctggctatggaacacagctagtggactgaattgaatgctccagtctgtgtcatatgtctcttttccttttagggaattatttgatagcacatactgatggctctaaagaagtcatcaccctcactggattctggtgatagtgactctgaggagttgccaacatttgcctttctgaagaaggaaccatcttcaacaaagaggagacagcctgaaagggaagagaagattgtagtggttgacatctcagattgtgaagcctcctgtcctccagcaccagagttattttcaccacctgtcccagaaatagctgaaactgtcacacaaacacagccagtcaggttgctaagcagtgaaagtgaagatgaagaagaatttattcctctggctcaaaggcttacatgtaagtttctgacccacaagcaactgagccctgaggactctagctccccagttaaaagtgttttggatcatcaaaataatgaaggtgcatcatgtgactggaaaaagccctttccaaagatccctgaagttcccctccatgataccccagagaggagtgcagcagataacaaggacctgatcttagatccatgctgtcagcttccagcctacctgtctacctgccctggccagagcagcagcttggcagtaaccaaaacaaattctgacatccttccaccccagaagaaaaccaagccgagtcagaaggtccagggaagaggctcacacggatgccggcagcagagacaagcaaggcagaaggaaagcaccctgagaagacaggaaagaaagaatgcagcactggttaccaggatgaaagcccagaggccagaggaatgcttaaaacacatcattgtagtgctggatccaggtcctcacatgtgtctttgtcctgtgctgagttatctgcgttctggaccccccactgacagtcccttttccatctgttgcagtgctcttacagatggaaggtgggggccagctcctaggagcactgcagaccatggagtgccgctgtgtgattgaggcgcaggctgtgccttgcagtgtcacttggaggagaagggctgggccgtctgaggtaggagttttctggctgacatttcctccctctcctccccttacaattacaggataaatatgcttttattttaaaggatacttatcagggccccagcaggaagacagatggcacattcaactcagggtaattaaaagaagattgaataaagggactgtttgccaaggcatgggcagggtatgaggaaactaccagtgacagcatggtacctcacagtaataacagcacaacttaggtttttcgacctcagtattgttgacattttagattggagaattctttgttttgggtgctgtcctatgatgtgcacaatgtttagcagcattcctggccactatctactaatgtacccctctcagtcatgacaataaaaaatgtctgcagacactgccagatgtcatttgtggggaaaaatcacccccggttgagaaccattggcatagctgttaccatccctatgcctgaagggatgaggggaaggagtggttaacagaattcaggagagagaaatggagagaggaccaccttgagcgaagctatgagctgccacagagggggacagcaaaccctaggtgaccccactgggagggagccaggggaaaaataccctgacttcacttttctccttcccactagtcctctcctcgggtccctgctggtgacacccagctgggagccagaagacatgtgggccctgtgttttttgtagagattgcagagtgtagcttgtatttttggtagagacggggttttgccatgttgcccaggctggtcttcaactcctgagctcaagcaatccacctgcctcagcctctcaaaatgctgcgattacaggtgtgaggcaccttgcctagcactaagattcttttttatctcaccagaagcatcttgtataaaataagaaaaaagatttttttttcctctctttgatttcttttttggatctgataactttctcagtaacacaggacagttccccacactttttactctgggggtattagcaagcctttatattcatagagcagcttaccctctcaaggcactcccacattctctcttgtgtttccatcagtcatcctatggggtaggacttctccccacatcacaggtggggaaactggggctcagaaaagttaaaagccttgttgaggatcacaacgggaatgagaacccagagctccccaaacctacactttgctgtaatataggtcttgctttgcttatagggacccaatcagaaaactttctatcaaagtcctgttccccaattactccataatactgtactgctggaggattgttggccttgaggcatccttgactttgattatgccctacctgtgataaacaggaggtactctcatagactgaagtttcccttgtgattcttgtctttgtcacaaaaaaacctatctgtttgtaaggaccactcggctcacagcatctgccttcaaagccagagtcatttacttgtactaacctttggaagagtttcccttccctccattcccgtattcaaaatggccccagcccctttcaacttgctatgttccttttttctctctttttttttttttgagacagagtttcaccctgctgcccaggctagaatgcaatggcatggtctcggctcactgcagcttctgccttctgggttcaagtgattcttctgcctcagcctcccaagtagctgggattacaggcgtgtaccaccacgcccagctaatatttttgtatttttagtagagacggggtttcaccatgttggccaggctggtctcgaactcctgacctcaggtgatccgcccgcctaggcctcccaaagtgctgggattgggattacaggtgtgagccaccgtgcctggcctgctatgttcctttttttttttttgatggagtctagccccgttgccaggttggggtgcagtgttatgatctcggctcactgcaacctccacctcccagtttcaagcaattctcctgcctcagtctcccgagtagctgggattacaggcacgtaccgccacacccagctaatttttgtatttttaatagagatggggttttaccgtgttggccaggatgggcttgatctccgacctcgtgatctgcccacctcggcctcccaaagtgctgggattacaggcgtgagtcaccgcgcccggctgctatgttcctttcttattcactgtctctgagatgcagggcaccaagactgaatcattgagggctgggagggacagcgacactgtttcttgccacagtgacttcattccagaaaggataatgcataaggggtgggagttagttcattcacccagaagacctgggccactctcacaggtgctcaatacctgctgacctccctccctgtgctgtgttctgggtactttggcaggacagagaggactgggtggaggagccaacagtactggtgttgctccgggcagaggcatttgtgtccatgatcgacaatggaaagcaggtgggcagagccagagggtgggaggacacggaacagagggctgactcttactaggaagcaagtattaatgcagtttctgccccttcatgcagggaagcctggacagcactatgaaagggaaggaaacgcttcagggctttgtaactgacatcacagcaaagacagcagggaaagctctgtcactggtgattgtggatcaggagaaatgcttcaggtttggatttgccctggtgatttcatgttaaaaggggcagctcttgggccaaggggggtgagtttagtttattcattgcagatgtaggtcactctgcaaggtagtccatctctaacaagtccagggggatgctctggtccagtcttcttctgtatcttctgcctgacttcagcctggagctgctgttctttgatttcctcccctgcaccagtgctcagaatcctccaagaagagggaaacagggagcaaataaacagaccaagaagcagcagcagagacaaccagaggccagcatagggtccatggtatccagggtagacgctgaagaggtaagaacgtcctgttgcctgaatcgggctgggtactcactggtcacctgagacttgctattgatagagaataaaatgcctgctgcgtactgttttctgccttggcactgactaagagaaggtaccaaacaggaagccaaggggctggggtgtggctttagtggacagtgacttggcagctagtctcttcctacccttccagtccatcgttgcttttgggtttctaggcattggtggatctgcagctacacacagaagcccaggctcaaattgtgcagagctggaaagagctggccgacttcacatgcgcattcacaaaggctgtggctgaggcgcccttcaagtgagtaaccccagcaagtccagcctccatgctgggcctgtcctttaccatggctcttgcagtcaaagcaaatgtccctttcccctcatctctgcagtcagcccattgtctctcaagcttgaggcagaaggagctgacctcacactggggattcttgggaagagtcctcaagcctagcgccttttcaaatattctcctttcgcctatatgtaagtatgtgttctgcaggctgatatcataggccaggttaccataggccaagttaccaggattaattacaggtcagatcacaatgtaataagcactaggaaagcaaatttttggcctactcagttcaagaagtgttcactgtcagaatttaaaataagtaaatgacctcagagacaatccagtccaagtcccttattttatacttgaggggactgaggcctgaagagattgacttgtctaagctcctagcagttagaagaaccagaaatagattgcagattgccagatatccaaagaatctggtatcttttcttctactataatggactagatgtagtttttaaatgaatcagcaactggccctatacctggcaacaaagtgagcactcaaattgtcaaaggcacaaaaaggccagatgtaacatggcgcccacctcttccaaggtcagtgggggggttttcagttgccacttgaggggaacaggtgtagaagagtaatgagcaacttacagctctccaaccacgctgttgcaggaagctccgagatgaaactaccttctccttctgtctggagagtgactgggctggaggggtgaaggtggaccttgctggcaggggactcgcactagtctggaggagacagattcagcagctgaaccgagtcagcctggaaatggccagtgcagttgtgaatgcctatccctccccacagctcctggtacaggtatgctgctccagggctcaggggtcactgcccattgcctgcgggctcagtgggcccccagatttccatggacaactgttgagggcccacaaaggcctcacaggtcagcagtgcaggtctactaagatcagtgttgctaatgctgacccagggagggaggacaggttctcatgccccaagccaagcgtagcaccctccatgctcatggagaagggatcaccatggatggtaccatattaagaggtcatctaccacttccaggcttatcagcagtgtttttcggataaagaacgccagaatttgctcgcagacatacaggtgcgccgtggggaaggtgtgacatccacttctcgccgcattggaccagaactatccaggcgtatctaccttcagatgaccactttacagccacatctctctttagatagtgctgactgattctagccctcagggatgaggatgaaaagctggaaacttccacttccccaacctcagagcctgactgtaatgaagagactggcagcacctcctggaacacaagcctaggtgaggcccagtctttcttgggtcttattatttgtgaaggtctctctgcctgtcggctggggcagagactgaaatactgccacctacctttggcatttaatgttcctctcctggcaaaaattcactgccacagacaaaccacccccactcctacccagccagccctcaaaacacaaaggaacaaagacagtccactcagacacttatttaataactgtagaaatccaaaagaattagcatcaaatcttgaagtcgtgagtgaagctgcgggttggcttgactgggctcagccactgagctgcctcaaccggccaaggaacgggattatgatgactatgcggacttctatattgtcttcatctcattgtgtgtattatgtatttagtttcaataaagcatttgtaccaatggctctggagcttggaggaagactaaaggaatgtgtagtgattctgagtaagatgtagacctacgcagcagagctatgggggagaagattaacaaagtcctttcttccaatatcaggatagtcatgagttgcagtcccatccaaaaggtcattagggctaaaaggccctctgtgtctctgaactatgagattcttgctccctccgggggagccaaggagcttgcaactgggagtttgcagtgaatgagcaccatgacacagtcatttctgatccctctatccagctgttgtgaaaagatgaagcaaaggaggcaagaaaatgcttaatttagcagacaagagaatggacagtgtgatccttgtttgtgctagccattgggtgatgcaccacttttcagctccatgatgctacttgtttcccttcatatcctgtttccatttatgcccttcagttatggtctagaatcaaacaattctaaacctcagtgtcttatgaagctgacacttcaaaacctgcagaagcaggttgcctttgaggtatttagtcacaccaagtacaactagagctgtcatagacagtgtaggtttgcagagatccacctccttgcttactggcaattagggagttaatgctctaaaattaggcaaggagcctggactgttgccattttatggaagccacataagttgggcaggactccacaggagctgcccgtgacctgatgatagcaagagatttctatctctgagtcgtgaaatctgtctaccatgaaagagtctatgcttcacctgaggaataatcgattctggtgtgagttctggtctctcaggacattataaaggagggaaaatgatgtaaagggaagaaagaataccagagtgggaatccagttttgcctcaaactagctgggagactaggcaagtcatggaagacctcagtttctctgtctgcaagtgttatattggactggatggtcatgaagtccctttcatagccagagattttgtgtggctgctaaaatgcttacatctctgaggtcctaaagaaaacaggaatacccctacctcccagtttagactggatttactgagcgtggtgttctagtcccccccagttcctcctgatctaccctgattcccagggaggaatgaaagggtttgtggcatacaaaagtataaatgtagtgacagctgaccatttagtagaaacgagccttgcctttacacagctttatataacaactagaaaaggctatgttttctctctccccacccccaagcctactcctttaggcatgcaggtaactgccccccacgcccccccgccacctcccatttctcctcattccttcagggaaccctgactaaggaatgaagaagtcctacaaagaggaggtctcatgtaccaatctgcagccatttgatgatggcaggtaggtctgatgctaaaaagaggttgtgtccagcagaacccaattccataggaatccaaactccaaggctgggaggcagcaggtgctggggacaagctcactgctgagagtcggtctggaggacccactggaggatctcatggcggcgtagaccctggaccgcattgtcatagatggtgttcacgctggtgcagaggggctgctgctgcagctctgtcacccgacaagcaaccagccctcccgccacaccaaatagcagcagcagcagcagcagcttcagcacagcccaggaacgagtgtgcttccggggtggtggcttgcggggacgggagccagacttagattctggaggaaaagtaacagtagacaaagcaagttcagtcagaggagacctgctctatactaatctctgctagtctcctccgtgcagatctacctacattccttcctcaagcaaaaactccccaggccctgaagagaaaaaatgtctccacagaccgaaacagaaacaacttttcccttggatctgaagggggtagatttgcaactggcactcattctgcgtgtctcatgtagctcacagccctcagggtcctaagttctccttggtaacatggtgatccacgcctcttgggatcgcagagggagaggcttatcaggaagcatccagcgctgacagagtactgtccacttggggaaacacggtcaggatttatcattattgtcattattatgatataatgtgtatataaaaagaaagcccaaaaggtaatacaccatattgtaagcagtgatgattgctaggaatgggggagtacaggtggttgccattttctgatatatgtatctagatagataggtatcttttctcaattctttgcaatgaacatatgttacatttttaattagaaaaaaattggttttgagatttttagacaaaatttttaaaaacttgactgatcatccacaatgccaggaactgcatgatcctgcttcctcatttaatccttatcactaccctgtatgatcttcattttcaacaaggaaattaaaaaccagtgagatcaggaaggtggaggcctgtggccctgtcctggtcaagacaagggtgagtaggggcagggccacaggcctccactctctgtacagagctccttccctcacctgcctctccctcaggagtcccttttcacccagagggtatctgatcctctgcagcatgtggagccacgtcactaacgaaattcaaccatagtcaggtaaaacacaaaaatgtgttttctatacaatgtggctccctgaatgcaggccaaatgactcctctagtgttcaagcagtgaggggtctcactgttgcccaggctggtcgtaaatgatcctcctgcttcagcctcccaagtagctgggaccacaggtgtgtgccactacacttggctaattttttaatttatgtagagacagagtctctatgttgctcaggctggtctcaaactcctgggctcaagtgatctcttctcaccttagcctcccaaagcactgggattaaaggcctgagccacagaactttactgtaaggcacttttaagagtaaacttgccgggcacagtggctcacacctgtaatcccagcacttggggaggccgaggcaggcggattacctgaggtcgggagtttgagaccagcccgaccaacatgcagaaaccacatcactactaaaaatacaaaattagctgggcgtggtggcacatgcctgtaatcccagctactttggaggttgaggcaagagaatctcttgaacccaggagacggaggttgcagtgagccgagatcacgccattgcactccagcctgggcaacaagagtgaaactctgtctcaaaaaaaaaaaaaaaggaaacttgaccatgtgtgtgatttttgcatatctcaatgattttagaccctcacctctaaaaaaaagtgagactctgttctgggaatgcttcaagatacatctgacccaaacacctgcacagaagtatgtgggcactggagaaacaaacaagctgggcactgcctccctaggagagtcccccattccccgtaaccaaaccttctcatccactcccaagctttagagtgtactttatctaaggtttgcaggcctgctcaccccagttgtctatgcctggaaacatgagtgtctccactgtacccctgctggaatcttacaacaggcagaaaacttactcggggcctgatttgcttccttcttaggtttcttctcctgctcccgcttggctgctttgagggcatcatactcctttctccggcgctccttctcttccgccttctcccgcttccgcagttcccgctcctgagcttccttagctcgctgcttagcctcacgcttcttctctgcctctacaacaaaacataccaaaatttgacttctctctcacaaacactccagcagtttgctttcccaagtgattaaaagtacagattctgccacctttaccctggtgccatggttcacataagaaatattcaaaggaaacagccatccttctgctcctggaagtagccctccccaaaagcagctgctctcagggtttgctgaatggtttctgattacgaggttcctatcctcaagcagcagagaaattagggtaaaataacaaggaggacctaagaaaggcatgagggataagtggtgctcctctagaattaggtactaactcagaaggcatagcaactgattgccttctagaactcagctatgaagagaaaaaaccatggcagttttctatgggactcctatcttcccaagcttcagaaatgaatgtggtatggggggacaagtgagaagagaaaatgagcactcaagtttagggttagaaacaatgacgccaggagcagtagttcatgcctataaccctaggactttgggaggtgaagctgggagtatcacttgaggccaggagttcaagaccagcctgggcaacatagcaagactgtctataaaaaaacgaaaaaattagctgggtgtgctggcgcatgcctgtagtcccagctacctgggaggctgaagtgggaggatctattgagctcaggaagtggaggttgcagtgaaccatgatcgtgccactgcactccagcctgggtgacagtgagaccatgcctcaaagaaaataaaagaaaaaaagtaacaatggcaatgtgttctaaaaaagtgaacctaccttcttactactgcactgactattttttttttttaaggctagtcaagtgaagcagtgggagtggagaaggaagaaagaaatctctaactggttgtgatgaattagttgtaaacaccactgcactaggaccagcctgcacttgactagtcttaaaaaacaaatacttgaactcatgaatctgagaactgaacacaggaacacattcagatttactcaatggttcaagcatgtttgcaaacttccaaattacaacctccaaattattgggttctaaaaatgcatttccaaattagttatttggaagtctgaaatacattttgccaaagccagaatgccacaaatgatggttaaatgtccttttagggcttaaaaggctatgttagccataatgtagctgaatagtactactgtaaatactgtagctttccactgcttctccatgtagaaacaagctccaagttccagctgggcaccagaatgccaagaacacactccacccagcctctagggaacatgggccactgagaggtgaaggcaacaggggtcagagtaaacacgggtatgtcttgccacagtggccatgcgtaataagggatggctgtaacttggcacggtgctctcagggactgcctgtaatcagtactgtacacatcccttcttgaaccacaagagtcctccagtgaggggctcagaaatcagccagccagtcaacagagcacctactatgtgccaggggttattttaagggcttgagatgcagcaatggagaaaacaggccacattccagtgcctatatcatttactttctagagaagacaataaacaggtgaacgtaacaatgacagtgatctgtgccctaaagaaactagcagaggggcacctgtagtcccagctactcaggaggctgaggcaggagaatggcttgaagccaggaggcggaggttgcagtgagccgagatcgtgccaccgcactccagcctgggcaacagagcgagactctgtctcaaaaaataattaaaaaaaaaactagcagagggtatgacagagtgacaggtagaatggctactctaatccagtggttctaaaagggttacagttaacctaaggcaacatttgagcagagatgtgggattatgaagccagcacttaaagagactaagggaaaaggaaacccagcaaagcccctgagtgagactgcagttggtgtactcaagctgaagttaatggcccagtttcacttgtgtgtgcaacaaggccggtggagagcaggcaagtaagcttgggccaaggtgggttttgctggccttgtcaatgagtttggatttcattctaagttcagtgggatgccattagagggttttaagcaagtagcagcataattatttatgttgtaaaaagatctcccagactgttgtgaagagaatgagtttaaggagatggcagcatcatggagacatgctggaaggcattgtgatggtcccagaatggtggctggttagagatggcaccggagctggagaaacagtcccacataggacttgctgacagattggatgtgggaattacagaaaaaaaggagtcattaacatctttcctattttaggcttgaataactatagggaaagtgatttcctattacagggaacactgggagggactgaagggccatcaggaatctgttttagccacatttcatatgaatgcctattaaccctccaagcagagatgaaatataagcagttgactgcctctagagcacagcagagaagccaggactgaagagagattcatcagataaagacgataccatccaccacaatactgtccccccaccgcccactaactgttcttcatgactactctactggatcccagctcctgaagcatgagaatccactggctgggatgaggacctgaaagataactacaagagggacagccacctaccacgttctacttccagccgccgctgcctctcccgctcctgatctgcctgcacggccttcatgtgctgtaacacctgcaaaggaaaaggaggaaagtagtgctcttcatagtcatgtttgctcagggaagtctcaaaaaacagactattttcaggcttccagattatcatggtagcaatgtagaactaataagagttaggctgaatgtggtggctcacgcctgtaaccccaacactctgggaagccgagatagaaggactgcttgagcccaggagttcaagacaagcctcggcaacataatgagaccctgtctctacagaaaaatgtaaaaaattggccaggcacagcggcagatgcctgtagtctcagctacttaggaggccaaggagagaggattacttgaacccagaaggtcaaggctgcagtgagctgtggtcacgccatggcactccagtctgggtgaagactgagaccctatctcaaaacaacaaccaccaccaccaccaccaccaaactaatagagttaattgtatctttgtatcctaaaattactgtgccaaccttagttggagaagagtgctatgagccaaggtcattaaaactgtcagaaaaaagtgaaacacaatgccaactcgaatctgtaaaaagttctgccatttacactcactgtcacatgcatgattccatatgaccctcagcaacaacttgggaacagcatttcctccaacacgctttcctgactgcccctcctgtggctaccttaagtccccctccatctactcctgtggaattcaacacaggacattgtagctacttgctacctatctggcttggtcataagatggcagattccttaatggcaggaaccgctgtctggtctgtaggtatcacacaggggcgtggctagcacagagtttagctaattgcaggcattcaatacatacatgaggaatggctaattcccatttcaaaaggaagaaaaccaagactcatagggtgatttgtccactgctaatggccagaaagcagcacagctaagacctgagcacagtcccctgcattcctagggcagagcttgtcgcacacactttcaccacatgcagaggagagctccgagagaagcctacacacagcacacttgtactcggcaatctgagctccccagatccacataaactcgctcatggatgacctctaaccacacaatcacaaagattctcgctatggtgggtggaggaggtaaagaccttttctgtttgtatttttttaaaggtggtattctttggctgtaggggatagagtgtaagcttggagcccaacgcaatcctgactaccccttattgtataaccttggcaagtgacttaacctttctgagccgattttctgatcgagaaaacagagataagatatacttctatggagtgttgtgaagaataaataatataacttgtattggctgccttgtataatctctggcattatatgtgctcagtaagtactgctgcttattttctttaccatgtgagtaagaaaaaagaagaaaacccaaactattagcaaaagggtcttgttttactactgcacttaacaattacatttgaatatgcatgcgcacgagacagacatgtatattcatatgtaattcttatttctagaaaactccagacacgcatacctccagacaagcacacacccatcataagaagtattcaggagcagaccagcaaaaggatctcctttcaaaagcctggtttgggccaggcgcggtggctcacacctgtaatcccacactttgggaggccaaggtgggcagatcactggagctcaggagttcaagaccagcctgaccgatatggtgaaactcccatctctactaaaaaatacaaaaattagctgggtgtggtggtgtgcgcctgtaatcccagctactcaggaggctgaggcaggagaatctcttgaacccgggaggtggaggttgcagtgagctgagattgcgccactgcactccagcctggacgatagagcgtgactctgtctcaaaaaaaaaaaaaaaaaaagaaaaaggaaagaaatcaggtctggacccagagttagggctcagggcactcaggcagtagagaagttatgggtcccgttgccatgattgcagggagagtgtggaaagtaagagtccagggtgttggctgaggaaaaggagtgaggggagtggatcacctgaggtcaggagttcaagacaagcctggccaacatggtgaaaccccatctctactaaaaatgcaaaaattagccagtcatggtggcatgcccctgtaatcccagctacttgggaagctgaggtgggagaactgcttgaacccgggaggcgcaggttgcagtgaactgagagtgcgccactgccctccagcttgggtgacagagcaagaccccatgtcaaaaaaaaaaaaattaattatctgaaaacacaggcaatgcagaaatgggacagattgtcatagtctggagtctgtgagctcctggagggtaaatttttgtctagctactctagttcatagcatacagtaagcacttgatgaatacattgaacaaatcatttttaaaaattgctttaatatgtaccaagcagattaagactaacccatatacccaccagggtttaggtcttacctggtcagagctagtaagacctaaactaattcctgcagacagacgacctgattctgactggcccaggccatttccctacaaagcctaaaggtgtgctgcagctctaggacagctgtgctagggaccatggctttagttaccacatccactatgctgcctggagctttgtctgaaagacatatgcaaatacaaaaggcctttgtactcaatcaaaattatttttgtatgtcaaaaactggaatatcatcaatttcctatggttccacatattacctactgaatgaatggatggatggatgaatgaaaggtgtgtatatgctgagggtttcttgtgtcagagaaatgaaagtaatgccgactcctcagggctctgaggattgtgagatggtgcatggaaagcatccaggacaaggaaagagtaatcaatggtagctactgtcagcttgcagaacagacatcactcctacagcacctagttttcaaaagaggatttcactgatcacttatactgttctcatctaagggaaaactcttgtcttagctacttggttaactttgtgcttgatttgttgtaataagagatgatacagatgacaagattatataagaagccctgagctaatgataagaagtatcttactctcttactctctacttgagacagcagagactcatcattcacccatgaattctagtatttaaagttaagtcttttttgttcaacatgcaccttaaacatagccaagttagtcatctggtgctcagctgaagcagcagcaatctgttccaaagctggagggaaaaagtgactatagttggagttattaagagataggtgtaatgctgttcttaataggtagggtacggcaccttccaggctactgaccacagacaatagttgtcttgcatgctgctttcagttcctcactcctatgtcagatgactcaactgtaatcaaataccaggtctgcccaggacgtgcctgcttacagctgtaacacctttatcatcgcttttattatcaacattcctacgactgtgcctcagaaaggccacagcccctaacccccggtactattaaaacaactgtccacacagtgtcatgttgcatcacgcaaggtcccggctccttaagagaggaagtactgcagtagagaaggcagtcttgttctgcgacttgcgaactaagtgcaggccaggcatggtggctcacgcctataatcccagcactttggaaggccaaggtgggcgaatcatttgaggtcgggagttggagaccagcctggccaacgtggcgaaacaccatctccactaaaaaatacaaaaattagctgagcatggtagcaggcgtctgtaatctcagctactcgggaggctgaggcaggagaatcgcttgaacctgggaggcggaggttggagtgggccgagattgtgccacttgcactccaacctgggcaacagagcaactctgtctcaaaacaaataaaaaacaaaaagataaagtaaatgcagaaacaaaggtctctgtttgacaggctcatagtggacatatttcactcggacctgaatgcttaactccacacaaagctccaggtgccctaggagggaaaaacaggaggaggagaaatcccagggagtgtataaggagccactgggagggagcttggtgcttaccttgtttgcacactgcttacactgcttctcatccaagcagtcacctgccaccttggccaggacaggatccagggggttatccttcaggtccaaccacttcaggttctaaagagatgggcgatgggcaaagaggctcattaagcccgagttcacatacatagtccctcagggtgaaacaaaatgagcaggaagaatgcccctctgtgttccacatatagggagcgccatctgaggcaggaccaacaagggggtatttctgtcagcctttctcagggccgtgctccagagtccctgagttctctgccaccctggccatgaaacactggttcatgaattgttaccttgagctgagcaaagctgacaggcaaggtgaccagcttgttgttgaggagatccaggtgctggaggttgaccagacggccaaagtctgctggcagctgctgcagcttgttcttactcaggtctagcttcaccaggtgtgtgaggccacagaaatccgactaggatccaaagagagaacctaagctaggcttgtccaacacacgagccacgacagctttaaatgtggcccaatacaaatttgtaacctttcttaaaacattacgagattttttttcctttttcagctcatcagtgtatttcatgtgtagcccaagacaactcttcttcttccaatgtggcccagggaagccacaagattggaaactcctcatctaagccttgggctcacacacttcggtgtaacagtctggaagccctcaagtcagaggtaccccatgtaaaaatcctggctctactgttagcagccgttcttcctcaaatgaaaatgcagagaacacctaccacacctggtgataattaccaagatatgtatggaaaagggcttagcacaaagtaggcacaaaacactattccttcaccctcagttcttgctccagcctaccctccacactgctcctggagaggtgtggttacccattctgtccttccacagcaccctatgctcaccattcataggatctgtcaaaacagcgtgctcgttcattttcttaaaaagatcaggcactcctggagtactcagtctgattcttgttatttgcagcacctagcacagtacttaacacaggtgctcaacagacattctgtgaataactaactgaacgggctggggtccatcctacccaagtcctggctctttctcaacacaggtcaaaacatccccctgacattaaacctttgctaagcacccatctgaaagcgatggtacaacctcagctaatgaggcactattcatgctctctagggacttggaaatgccagtggatctgaaatgcagagtgaaatggaagttgtcagtacagacaacagaacaagctcagatcgaaaagtgcacttggctgaatgaccatctggcaaagtgtacagaaggagtgcggctgcaaggaattgctaacctgcttttatttttaattttttagaggcgggatcttgctatgttgtccaggctgctctcaaactcctgggctaagtgattctcccacctcagcctcctgagttactgggattataggcatgaaccacagctcccaacatattcttcttttattcaacacaaaatactttctggaagaagtgagatctcgatgctttttgaatgttagaaacagtttttgatgagctgtgacaaggtactgtggacgatgagcaaggcctaggagaatactgagaggtgagtggactaataatccaatgaggacattgccaacttctgaattcgacctctgagccacagccagggccaaataggaagtcaccctggagtacagcaaggagtggcacggctagagtgatgggtggaagtggcaatagcacacttaggcctgacggtgcaggagcactactatgtcagagaggctgaggggctgaatgaatccactgtctacacaggtggagtggaaggaaaactagcagacgttgtgcaagaaaaataaaaaggatttgatcatggattgaatgtgctgaccacattgagcaaatctcaactaattcaagtcctttgggagaataatgataaggtagcccataaaatcaccttctttcttgctccccatcaaaagatgcacaaggaagctgttcacagctttctccctggaacgcagagcaacttacaaaatggtctctagcatcctctatgcagtagggaggtaaactatttttcagaggaataaaataatgtagaaaaaagatgagcccagtaagttactcagcaccctgttgagtttagttttctgtggactgactttaccactgttctgaagaatgaggcctccatctcaattcctttcccactgagaccaaccactccattccactgtgcctcccctacacactcagatttagctatagcctgcctgtaggcctatcctgaaattacaccttatgacaccctcccacccccctctcaacccccgaaacaggaaggagatgcatccaaggcaccagaaggagtcacggctgcatgccaatcttaccggtagagtagtcagtttattacaagacagatccaggatggtggcctttggaagggcagcctaggtaaaagaggatgagaaaaacatgtcagaccaacatctggaacaattcactgacatatgttaatgaagcattttccagagaatgttcccatgattaggaaaggccttttaaaatggcagtaaagagtaatgttcctgggaataagaggaaaaataagccagtcaaccatgatctaaggaagaatgcaaagagaagggatgtggctgtacaacctccaagaaggtaaaccttaggcgaggcacagggactcacacctgtagtctcatagtctcagctactcagaaagctgagacaggaggatcgcttgagcccaggagttcaggagtttgaggccggcctgcacaacacagtgagaccccatctcaaaaaaaaaaaaaaagaaaggaaggcaggcaggcaggcaggcaagcaaaatttagattcttagacattattcctagcactttaaaaataaatattacccagcgtccctcttattaggtttcagggcagggacagtgtctaataaagctttgcaatttccatattccccagttcaggcccttcctcagaacaggtactcaatatccatacatgttgcctgaatcatgactgatcgagtaagtagcggagtgaatgacagagtgaaaaaacaaggccctgccgggtgcggtggctcacgcctgtaatcccaccactttgggaggctgaggcaggcaatcacctgaagtcaggagttcgagaccagcctgaccaacacggagaaaccctgtctctactaaaaatagaaaattagccaggcatggtggcacacgcttgtaatcccagctactcgggaggctgaggcaggagaatcgcttgaacccgggaggcagaggtttcagtgagccgagatcactcctgggcaacaacagcaaaactccatcatccaaaaaaaaaaaaggccctcacagcccatctctattttcccatggtgtccaggctggacaagctcagcaaaactttctccctaaggttaatgctggactgttcagatgcctggagtatatggtttcagagagcagtcctagggcagggtgaaataaggctggccatctatcttcctggggtagaaaaggaggcatatattcagttaaggatcctctggcaacctgcactttctgtcacaaagtcgtaaaagtgaagtttgaccacctaaaaaagttttaaatactacagcgggaaaaacacaacaacagctacaagtatcagtatttgctccttccaagcattttccattacaatggtatttaacctcccaataagcgtatgagatggaaactattatcaccattgtatagatgaggagatctaggcataaaggctaactagcttgccaagggcactcggctattaagcaatggagctgggaggagctaggaacccggttctaaccactgtaatacccgtccacggtggaagaaagactgggcccagcgcccaaggcaaatgtaatttatcaacggcagaaagcaaagtgtgggtcacccaaagtgagtctagtagggcgttggcgcgggtgggagggggaacggagtgggaaaaggagggatgtgggaactagctccacgctgacaaaactagatgcctgctatctctctggagctgtaagcttcagtttacaggggaaaggttgggggagagaggggcgaaagggactcccgccagtttcagcggaattcagatgacagtttaccagccaagctggggggagactttactttcttcgagttaggctgcctcagggctcgggcagccagctggaattgccagcttcctagaagagccaggttctgggccacacccaggtctaccaggaggcctactcccctggaacaagtcactcattcattctcgaatacatccagtaactgctccgtgtgctcctactcagagtcgggcacggaggtgggcgctgtgaaagccccgcaaaggtgacagattcgcttcttagcctgtaaaaagcctagggccagagaagcagatcttccctatgttctggaactgcgccaaagtgacacgtgtacatcccgggaagaaccttgggctggacgcggcctcctaggggacttagtcccaccaccccgcttctttttaaagaaaaggaaactgatgcttttagagaagaggaaagtaagtggcccacgtaggggccagcgcccggcgaaggtgggcgcctgggcctcgcgggacgatactgaccagctccttcaccgggacctcattcaggtcgctgaggctcaggtccagttcgttgccgtccagcttgtcgcggaggttcccgcccttgctaccggccttggtcatggtaacgccggctgagcgggccccggctccggggttccggcgggtgaaaggagctgaaatgtcgcttgtcagttcagcggccccccacccaaacgacgacgcctgagccctccgtcgccgccgatgcgagaccgcctccgcccgctggccgcactccgagcctcgcgcctagctcccaccggtgccgcgacgacgaccacttccgtgtccacgtcaccttccgcgaccactgagatgggctgggccagagcggcccgagcgtgtgcgggcacgccccctggtgcccagggtgatgcactgcacgtcgccgccgccggaggggtggggttggaggctgcgagctcggttcacgttcacccgtggcccgcgggcattattgctggcagtgccacgaggcgaaagggcacggactgggcgccagaagactgggttgacatccaatactgacctcatcagatcaccccaatccccctgattaggagcagaagctgggtgtcctctaaaactgctccctgtcctctacttaacccccgaataaccatcatggggaaaactcttcttcctgaatttctcctctctcctccccactcactgcctcagtgcttgtctctgtccttccatccactttcacccagctccccggtgatctttctaaaaatctggccaagtctctcccctacgtaaaacccttcaaacttgcagctacctctaggatacggaccactttcctttggaagctgggtcctgcctgctttcgcagcttcctcacacgctccagtccctgcctggcctagatgctgtgtagatttccaggaggtggctcccacgtctggccctccccagcgatggccctccctcccccccactcacctctgtctagctaattccttagtccttcaggaaatctcccctgaacaccgtgaatgccagactgagttagcgccccccccaaccaacttaggtccctgtttgctactttatcatcagagacagtagagcttgatggccaagtgggacctctggcactaatacctatccactgggtattcatcctggctctgccacttgctacttataaaaccgtagacaatcaccaggcttcagtcttatctatgaatcaatctatgagacatgtagctaacagaggttggggagaactgaaggagtaaaacacaccaagagcttacagcagtcactggcacttagtaagtacccaataaatattagctacaattcatgatccaccttgtattatactcatctttatgtgtctgtccttcattctggactgtgaggacagggatttttgtcttaatcatcttcgtatgcccagagttggcataccctgatgcagggtagctactcattcagatgtctgttgaataaatgaatagatggatggatgaatgaatgaatgaatgaaggaaggaagcactttacccactccaaacctcagtttactcattttgaaatagggatattaaagcttatctcagaggggccgagcaggatagctcacacctgtaatcccaatacttgggaggccaagatgagaggattatttgaggctaggagttcaaaaccagtctgggcaacatagcaagaccccatctctaaaaaaataaaaaataaaaaatcttgtctcagagggaaactatgaacaccaaataaagtaagtgcaattgttacggggggtgggtggcaggggtccttgttcttagaactcccaagatggtggcgggccacttccaagatggcggcaagcctcttgttctctgacctgggtttcttggcctcacgcattccaaggaatggaatcttgggccatgcaatgagtgttatagctctattcagctcaattaggacaaatccaggcacttagccacgcaggaacaatggcaagcctttagcctgatccagagcagcaatgggcgcctcactggatcgggagcccagcagacaccctgccagatccagaggggtggaagtcagcagcgggtctgcgacagcagcaaacagcagtagtggacggtaaggaaaagctcagctcaagccgtaacaaacacggaccagaaaagtgtgcagttgcaagatttaatagagtgaaaacagagctcccataaaatggcaggggacccaaagggggttgctgttgccggctcgaatgcctgggtttatatcccgatcattgtccctcctcctgtgctctcaggcgatagatgattggctatttctttacctcctgtttttgcttaattagcatttcagtgagctctctttactacctgattgatcaggtgcgagctaagttgcaagccccatgtttaaaggtggatgcggtcaccttcccagctaggcttagggattcttagttggcttaggaaatccagctagtcctgtctctcagtgcccccctcaacaggaaaacccaagtgctgttggggaggttggccgatgaccgctctaactgcttcctgctaaattggggcatagtaggggttgtgcagttgagatttcctcgggagggttgcttttgatgtcaccaacatcacagcatgggctagcagactggtccaggggtccacggtagatcttagtcatggaccgcatctggggctccatttaaagaaccatttgtagttttacagcttcgattctggaacagacaaacttaacaaggaggttaaagatacagggattgaaatgtatggcctgtagtgtaggggattatttctttggcacacttcacaggccctgactatctacttgatagttttgaaaaggcctgtctagtaaataataatttggccatctgatgggtgctatcaatgcctaagtgaaaggtttggtgaagggttttaagcaatttccattggttagctgcaggcaaaagtatttttccttctccagtggctagtcatcctgaggggaggaaactatgtcctcgtcaggttccccattctatttctcctgctgagtactggggcttggtttcctggaggggattaccccatactaggggttcttctataagcatttctaatggagggtcccgccttgcggctcttttggcttcaatatccacttggcggttcccttctatttcttctttcctttcctttcctttctgatgaccccggtagtgtaagactgccacctctttaggtgtctatacagccaataataatctcctgatggcttcctgatgtttgataggtgttcccttggaagttaggaattcactttctctccatattgctgcatgggcacggaggactaggtaagcatactttgagtctgtatatatatttacccttttcccttctcctaattctagtgtataatggcccctgcttttgctagaatgtctctccctaacaagggagtggggctttcaggcataattagaaaagcatgtgaaaagagtaagttccccagtcacaccttagtggctgggagaagtatctagtgactggctgtcctaggacccctcggatagtgacagatctggaggacagttgtccgggacaggagagtaagactgagaaggccacgccagtttccaggagacagttaacctcctggccctcaatggtcaagcatacccagggctctgtgagggtgatggcatgggctggcgcttgcctcaggcaccctcagtcctgctgctggatcatctggtcagtggcttctgactcagaggaccttcgtcccatggggcagtgggccttccagtgattcccttgacataaggggcatcgacaaggggtggcttatttctatttggacaatcttttttttttttttttttttttttgagacagagtctcactcttttgcctaggctggagtgcagtggcgtgatctcggcccactgcaagctccgcctcctgggttcacgccattctcttgcctcagcctcctgagtagctgggactacaggcacccaccaccgcgcccagctaattttttgtatttttagtagagatggagtttcaccgtgttagccaggatggtctcgatctcctgacctcgtgatctgcccgcctcggcctcccaaagtgctgggattacaggcgtgagccaccgcgcccggccttggacaatcttttttaaagtgtccttgcaggccgcactggaagcaagccctattaggcattcgatttgctcagcctttccatgttccagagcctccaaggtccgcttgcctgaggaccatgactaaagcggtggcctttttcttatctcatttgtcctgttctgcctgttcctccttatctctattataaaaaaaccgaagttgccaagttcaatagggtttctaaattttgctccgggcctaaggtggacttccgaagttttttttttaatgtctgcagctgactgagtgataaacttatcaagattagttggccttcaatagaatcaggtgacagagaggtatgcttcctcaatgcctcccttagtctctccagaaaggcagtaggattttcttcctttccctgtgttatggtggacatcactgaataattcataggcttcttcctagtttccttagtccttctatctagcacgccagttagtaaatgtctgtggcaccaatctctatgttgtgattctgcatcccaatgagggtctacactgggaactgcctgctggcctgtgggaaatcgttctctttcctctgttgtcatcctatcattgacctgactgagataccagatatcgccaaactctcgggctgcagttatggcggcacttctctcatttgtggttagtgtccgatctagcggtaacattatatctctccatgtcagaacaaaggattgtcttaacccttgtaaaacatcaatatagccatcagggttatctgagaatttacctaggtctattttttttttttaagacggagtcgcactctgttgcccaggctggagtgcagtggcatgatctcggctcactgcaacctctgcctcctgggttcacgccattctcctgactcagcctcccgagtagctgggactacaggtgcccgccaccacgcctggctattttttttttttttgtatttttagtagagatggggtttcatcgtgttagccaggatggtctcagtctcctgacctcgtgatctgcctgcctcagcctcccaaagtgctgggattacaggcgtgagccaccgcgcccagccttacctaggtctattttaatttgcttcaagtctgacagggaaaaaggtacatacactctgactgggccgaattctccagaatacatcttaggggcatttttgccttggggggaatgtttcccatctgaaaaaaaaaatagagatgccagcacccctagtgattttcccataagcattagtcctagagggtgctctatggtcctaatgcttattcctttccagggtgcataaccacccatggacttctgcttatcggattagttatgctcaccgatgtagcagtcctgcaccccttttcccgagcacaaagaaaggggtccgagctgctggattctagtggtcctttaccagcgtgcccaacattgccttcatgctcagaggtgagttctagagctgggctgagttcttgagtatttcctaacaacccagctgccccatcaagatgcatccccataaacaacagttcttatgcaaattcgcttcagagagggtgtaggtaaccttttgagtcaggattgagatagagtctttttgattctgtaagtactttaaggcttggctgagtgcaaacagctcccacgtttgagcagaccaattattaggcaattcttctaactctgcttccacaagagtctccctatcaattactgaatacccattgtgttttttcctcaatcacctgggaggagccatctatcattcttttctgaagggagttccttctaggtctggtcggacctttgtatggtaattaagatttaaattccctgttaggaaatctgctgggttaagggaattttcagtggttagtgttaaattacctttttctaacagaatagccccatactttaagatttttgagttagtaagctacctttttgcttttttgacttagaataattctgaactggtgaggtgtgctcacaatgaggattcctcaaaaggctacttttctaggctgggcacagtggctcacgcccgtaatctcaacactttggaaggccgaggtgggtggatcatgaggtcaggagatcaagaccatcctgcctaacacggtgaaaccccatctctactaaaaatacaaaaaaaaaaaaaaaattagctgggcatggtggcgggcgcctgtagtcccagctactcaggaggctgaggcaggagaatggcgtgaacccgggaggtggagctggcagtgagccgagatcacgccactgcactccagcctgggcgacagtgagaatccgtctcaaaaaaaaaaaaagttacttttcactttcttctcttagcaaagcagttgctgctacagactgaatgcatttgggccatccattggttcctggatctcagtgctttcaggctacgcccttgtttacactgacaacaaggcagtattggagtgttatagggtcacagagaagaccttcaattatcaattataggttttaaatttaccctggcttttaaaggaatagggcacactgttttttctttactacatctatctctctttttctctctctccctctcttttttctatctgtctctctctgtctcttctctccttgacttactcaattcgctttcatcctgatctattatgttgtcgtagacccagttccagttgttaacgtactgggtcatcagttctaaggccctggccaaggagccaaggcttggagattgcattgcagagggataagctgggtagaaattgggggaggagagcatcttacacaatgggagagcaatcctcctagccatttacaaacttggggccctggcaagggtgttggggaatgggtcccacctaactgcccatgtcgagagctgtatgcctaaattgggaggtacatcagggacaagactccctgggttcatattctagatgcctaaggacacagcatagagcttccttagatccctttggagatacaacctgctctaatacttgggagaggaagtgaaagtctgaagcattagacctaggaggcagggatcagaggaagtagattcagaggtaaggagaattttggggctacactttcaagaaagtcatggtcgggacccaggaggtatgggtcagaaggaaaggtaggggcgcacgcatgggtgactgttgagcagagacttctggctgcaccatgatctcaactggctaaccccgggagttcgggaagacagctttctgtctctagtcagccctcagcttccccaggaaaattgaaagcggaagctggttccaggcagaccaacacttctaacccagaagggttggggttgttagaaagccctttccaagacagccttatacctgagtcttaagtgaggcggccacgctaatcgtttttaactggccgacagatgcccagtattttcctccaattctaaggaaggataggacagaatagcaagtgaaagtggtccaatattactgctttggaggtcccttcatggttgccaatatcttaccagggggtccttgttcttagagctcccaagatggtggcaggctgcttccgagatggtggcaggctgcttccaagatggcggcaagcctcttgttctctgacctgggattcttggcctcatgcattccaaggaatggaatcttgggccatgcagtgagtgttatagctctcttcagctcgattaggatgaacctgggcacttagccgtggaggaacaatagcaagcctttagcccaatcgggagcggcagtgggcaccttgctggatcaggagcacagcggacactctgccggatctggaggggtggaagtcagcagcaggtctgtgacagtggcaaacagcagtggtggacagcaagtgaaagctcagctcaagctgtaacaaacatggaccagaacattgtgcagttgcaagatttaatagagtgaaaacagagctcccataaaatggaaggggacccaaagggggttactgttgccagcttgaatgcctgggtttatatcccgatcattgtccctcctcctgtgctctcaggtgatagattattggctattactttacctcctgtttttgcctacttagcattttactgagctctctttactacctgattggttgggtgtgagctaagttgcaagccccatgtttaaaggtggatgcggtcaccttcccagttaggcttagggattcttagtcggcctaggaaatccagctagtcctgcctctctctcacaatggcctactccttatttatcaaatccccgctgtgcacaccccaacccgtcgccagcaaggcactgtgctgggcttctgggaaacagacaagggcaattggataatacatacattagcatttggcaatctctaaatccttgagcatccattatcttattttgataatgtacatgaggagacagtgaggcacatttcatcgtactccctctcttaaggaggaagaaaccaaagctcagagaggaaaagtcacttgttctcagccacacctttggttgaggggcagacttttttattccaaatcctgtttcttttcactacaccctatttttcctaccatgaaggagcctacagtccatgcaaataattattataaaaggtaaaaggataagtgcctgaacacatagagatgagatctgtgcatgaatatgtagtgctgtgtgtgtgtgataacatcaggttgacaggtgcaaaaacattatttgtgcctcagactgtgctttacatatattatgtcttttaactcggccttcacaacagacttataaggcagacattatttcagttttacaggtgaagtgattgaggttcaaaaaggtcaactatttaatgacaatcacagcaggaaagtgaatgcattccaagaaaggtgggtgcaaacccagcatggtggggaggagcctgtacggaagagagaaatcagaaaaggcaccatggagaaggtggcatttaggttgggctttgaaggatggatgaggtccagacaggtagagatgcagcccagggaagcagagaggcagagcaaggaactgaccacaggtactgactttggggaagatttctttaaatctcttaggctagagccctgcagctttgtgagaaagtgaagcctgtcgtctgttggcagcctttttcttggaaacaacaggctggccctatgctgaaccccccaaaaccaaatgccactttgtgcttggatgtctgaggttgttaggggagctgccaaacagaacacaagtaccagcagcaattgagaagcccaagatcaagactaggacaggagtcatcagctgcctgaaaacccttgggcgtcaggccagtgcagccactgctaactctggggcaatcttggcaacttgttacactcccagcttctgttcctccttctgtaaaacgggtataatagccaggtgcagcagccattgcctgtaatcccagctacttgggaggcggaggcaggaggatcgcctgagcctaggagtttgaggccaatctaggcaacatagtgagagcacccccctattctaaataaataaatttttaaacattgaaaaagtgagcataataatatgaagtagcacatcaaggatccacagagagacaggagagaaagagccaatagcaccacgcagcaggaatcaacctttttaagggcagctgagtccctttggcaggtgggttgaaaaaaaaaaaaggcaggccaggcatggtggctcgtgtctgtaatcccagcactttgagaggacaaggcgagtgatcacctgaggccaggagttcaagatcagcctggccaacgtggtgaaactccatctctactttaaaaaatacaaaaattagctaggtgtggtggcatgtgcctgtagtctcagctactctactcgggaggctgaggcagaagaattgcttgaacccaggaggtggatgctgcagcgagccaagatcacaccaccacactccatccagcctgggcaacagagctagactccatctcaagttaaaaaaaaaaaaaaaagcagtctcaggccttgaggatgtgagcccccaaagtatattttaatattgatctccatttatatagtttacttacttacataaatttgcttttttcgagacagagtctctgtctcccaggctggaatgcagtggcatgatctcagctcactgcagcctccacctcctgggttcaagcgattctcctgcttcagcctccaagtagctgggattacaggtgcgcgccaccatgcccagctaatttttgtatttttagtagatacggggttttgccatgttgaccaggcttctcttgaactcctggcctcaggtgattcgcccacctcagccttccaaagtgctgggattacagacataagccaccacgcttggctataaattcgccttaaatacttccacatgtagagacatacatgtggaatgtaagtcaccatgttcctgtaagtcagcctttcccaaggtaaccctcaaattgaaggcaactgcaattagaaatcccaagatttttgtttcatttttgtttttagaactaagtaaatattctctttttttgtttgtttgagacagggtcttgctctgttgcctagctggaatgcagtggtacgatcacagctcactggagtctccacctcccagtgctcaagtgatcctctccaccttagcctccctagtagctgggaccacaggcatggaccactgtactcggctattttttaattttttttggagacggggtctccctatgttgcccaggctggtcttgaactcctgggctcaagagatcctttcacgaccacctagcaaaagtgctgggattataggcaggccactgcgcctggcctaatattatcttaaaatgcatatagaggggctggatgcagtggctcatgcctgtaatcccagcactttgggaggctgaggtgggaagatcacgagatcaagagatggagatcatcctggccaacatggtgaaaccctgtctctactaaaaatacaaaaattagctgggcatggtggcacgcgcctgtagtcccagctactcgggaggctgaggcaggagaatcatttgaacccaggaggcagaggttgcagtgagccgagattgcgccactgcactccagcctgggcaacagagtgagactccatctcaaaaaaaaaaaaaaaaaaaaagcatacagagggggccaggtgcggtggctcatgcccgtaatcccagcactttggaagtccgaggcgggtggcaccaggtcaggagtccaagaccagcctggccaagatggtgaaaccccatctctattaaaaacacaaaaattacctgggcgtggtggcaggcacctgtaatcccagctactcgggaggctgaggcagagaattgcttgagccagtgaggcggaggttgcagtgagccaagatcgtgccactgcactccagcctgggcaacagagactctgtctcacaaaaaaaaaaaaaaaaaaaaaaagcatatcgagggatatgacaattgtactttttaaataaatatttttaacaaaaaaaaaatgcacatagagggaaaagtcaagttcatatagcaagataaatgtgcaagaattgctatgaagctgggcatagtgactcatgcctgtaattccagcactatggaagtccaaggctggaggattgcttgagcccaggagttcaagaccagactgggcaacataggaatggatactctgtctctacaaaaaataataaaatttgtcaggcatagtggcccacacttatggtcccagctactcaggaagctgagggagaaggatcacttgagcccaggagggtgaggctgctgtgagtcgtgattgcaccactgtactccagcatgagaccctccccctatcaaaataaaaataaaaaataaaaattaaaaaaaggccaggcgcagtggctcatgcctgtaatcccagcactttgggaggctaaggtaggtggatcacttgaggtctgaggtcaggagttggagaccagtctggccaacatggcaaaaccccgtctctacttaaaaaaaaaaaaaaaaatagccaagtgtggtggcacccacctgtagtcccagttattcgggagggtgaggcaggagaatcgcttgaacccaggaggtggagattgcagtgagccaagatcgtgccactgccctccagcctgagtgacagagcaagattctgtctcaagaaaaaaaagtcaaatccatcaacaaatgagtggttgaaaaactgagaatgtatttatacaatggaacattactgtggaaaattatgcagccattaaagagaatgactaggaactgtatgtattgatctggaaaaaaatgtttattgcatatggtcaagtaaaaacatgcaagtcattgagtatggtacatggcctgatctcattttttagaaacagaatttcattttgacattatttcagatttacagaaaagttgtaagaatagaaagaattcctggagctgggtgcggtagcttacacctgtaatcccagcactttgggaagccaaagcaggagaatcacttgaggctaggagtttgagatcaacctgggcaacatggcaagaccccatctctattataaaaataaaataaaataaaaataatttctgtgtactttttttttctttttttggagacggtgtcttgctctgtcgccaaggctggagtgcaatggcgcaatctcggctcaccgtaacctccgccttccaggttcaagcaattctcctgcctcagcctcctgagtagctggaattacaggcgggcgctccatgcccggctaattttgtatttttagtagagacgaggtttctccatgttggtcaggctggtctcaaactctcgacctcaggtgatccaccggtctcggcttcccaaggtaccaggattacagatgtgagccactgcggctggccctcctgtgtactctttacccagatctcccatttgccatttcactacagttgctttatccttctgtctctctgtctacacacacacacagacacacacacatacacacacacacacacaatttctaaactgtttgagtatgttgcagatatgatgcccttttatcactaaatatatcaattttttttctaagtacaaggaaatatataaccacagggcaattgtaaaaatcaacaaattcacactgatcaatactactctctaatctatagactttattctgattctattaattgtccagcatgattttttttttgtaataatagccagatttaatggcttatgcctgtagtcccagctactcgagaggctgaggcagagaatggcttgagtccaggagtttaagttcagcctgggcagcatagcaactcttcttctcttaaaagagaaaataaaaattatatatataatattaacagagatatgatatattaatatataacatataataatatatataatattcctaggctcaatatatatgagcctaggaaaatgtatagatgaatatccatactttttaacctagttaaccttaaaaatttgctaaaatcagccttataacttttgtaataaattataatatagaaaagtttattacaaataaataagcaatgaatgaatgaataaataaaatcatcatatgttgagatggaactgagatcaaatctggttctaccaactttggacacattacctaatctctccaagcctggattcctcaatcataaatctccacctatagaagaaactattttgtttgtttatttatttttttacagacggagtcttgctctgttatccaggctggagtgcagtggtgtgatctcggctcactgcaacctccaccacccagattcatgcgattctcctgcctccacctccaagtagctgggattacagatgcatgccaccatgcctggctaatttttgcatttatggtagagatgggatttcaccatgtggccaggttggtctcaaactcctgacctcaagtgatctgctcacctcagccttccaaagtgctcagattacagatgtgagccactgagcccagcctcttcttgtttgttggttggttttgagacagggacttggtctgttgcccaggctaaagtgcagtggtggcgtgatcaggtgactgtaactttttttctttttttttttttaaatagagacggagtttcatcatggtgcccctgctggtcttgaactcttgggctcaagtgatctgcccgtctcagtctcccaaagtgctgggattataggcctgagccatggcacccagccagctcactgtaacttcaaacgcctttgttcaaggtttctcccacttcagcctcctgagtagctgggactacaggcgtgcaccaccacgcccagctagaagctattttttcataaggattaaatgagttcttagtccatagaaggcactcaaaaaaatcattcctgtaaaaccgttcatctcttccttattcctgccttctcccctctgttcattccatttggaatgtcctctccttcctccctttccatggtcaccatccttttcatccttcaaagtccagtccaaataccacctcctctaagaagtcttacctgatcaccctgaccaaaagtgagccattcttctgatgcccatagcactatgtcccgctttgcattagttgttggcatgggtagcagtgatagcagaggagctcaagaggagtctgctgggggtttccagagaaaggctttccttgctcatcaaaggcatgccaagaccatgagggaaggcactacctacttcaaaaaaataaaacaaggaagacagagggagatccgacagagaagaggaggaaatgtgagcacagatgcagagattggagtgatgtggcaacaagccaaagaacaactggagtcactaggtgctgtaagagacaaagaatggattcttctctggttcccctctaaggaactagccctgccaacaccttgattttatttatttatttaattttgtttaagacagagtctcactttattgcccaggctggagtgcagtggtgtgactgatctctgcccactgcaacctctgcctcccggcttcaagcgattcttgtaccttagcttcccgaggagctgagattacaggtgtgtgccaccatgcccagctaatttttatatttttaatagagatggagcattgctgtagcaggacaagccacaaacaaaacccctcagacactgagttaaagaaggaagggctttattcggccaggagcttcagcaagagtcatgtctccaatgaccgagctctccaagtgagcaattcctgtcccttttaagggctcacaactctaagtgggtccacatgagagggtcgtgattgattgagcaagcagggggtatgtgactgggtgctgcatgcactggtaattagaacagaacagaacaggacagggattttcacagtgcttttctatataatgtctgtaatctatagataacataaccaattaagtcaggggtcaatctttaactaccaggcccagggtgtggtgccgggctgtctgcctgtggatttcatttctgccttttagtttttacttcttctttctttggaggcagaaattgggcataagacaatatgaggggtggtctcctcccttattccccccctttgataatctcactcaatagtgggagttctcactttcatttttattacctatgtcttcttgcaagacagatcgatagtaattcatatagtacacttgtgctgaagcattttggtgaactaaggtagtgatgaagctttttatcatttgaagaagtacaggtagcaaacaagggagcagcaagtaggtttctattactattataactcttattacaagagttttaaatcttcttaatgctgggaaccattttccaaacatggcgtcaggatcaaatccatgccacacttgcacaggcacatgtgccagttttgtcatatttctaactatgtcttcaactacttgcccttgatcatctatgtgtaggcagcaattagtagggttaaatttcctacagacccctccttcagctgctagcaagtagtcgagagctaatctattttgatagatagcatttctcatctgagtttcttgccaggccagaatagtcaaggccctgccagtcttattagtgattatttctaagacaacttgtaactgtgtgattcggttgagcacgtaaatgggagtcgggtatccccacgagctgtcttgtgcctaagtaccaggcctataatattgtatgattctctcagggggccatttatcatctttttaattttctagttatgcttctatttttgcgggaagcacagacagggaagcccaggagttcgcctgtctttatgggcagtaggaagaaagatggtttaatagtgccaggaacacaactacctgcccactggtcgggtaatttggtataagctctatgcccacatatccagtatagtccagtgggggctgtccagtcccagtgggactccgggtgggttcacacagtttgcaacttcgggaatttactaaatggatttttcttagtgtggtttgaactccactaggtggctgtttttgtagtattattatacagtttttgcccaaggcagcagagtcttcccacaggaagggtgaagtccttccttactcttgctatacagtattgtctaatgattgaggcttttaggacctagaagttatcagggtgattattttgagccaggaattcatcaggaactgggtctgtaggtactaattctcaggcttcctatggccattgatctcccattacagttcctctacatatctacatacataacatgaagtgacattgagagactgggctaaatgctcagctaattgcaaaaacaaatttcttgtttttcctggaatttctggtactggcacagtcagtttatcacagaaggtttgaaatactggctaaggagagggtttataaattcctcaaaccacgatatttacttgaggatccagtccagccccatcgattcctagggttacacacttccctttttccagtgaggatcaagggggttggttattaccaattctaaggtgttacactgaccactggcacaggaagggccagttttccctttctgaaggtggacaggatcctttttattttttatccaagtagcctaaatgacacaagaacagtatccacattatttccacatggtcctaattcatgacaaatgtacttattttcttctatacagtctcttccttaattaagagaatcacatcctatttctaacttattactattaatgacagcgcaggcatcaaactttaaggtgacttgtttgggcacccctttttcttttgttttggctgacaccttactcgtatcatttatgagccttcaccagtcctcagtccttaatcttatttcaaaaactgtggtcatgggaggctcagatgggtcataacacacacgaggttgctcatttcctgggctacataccttgcatagaatagcattatacaaacatagcattatacaaacaagttttttttttagagtcccagtacacttataataatcataaaataataagactatagcaactttttgtcctacctcagtgacttgatgtatgcactgggagcagtccccagtctgaggaaggtcagttaaagtccttactgtacaagtccaaattttaaggcaaatgagtcccatgatgagttttctcatgcttcagctgtatgtggaccagtcagcttccgggtgtgagtggagcagggcttgtcgtcttcttcagagtcactttgcagaggttggcgaagctgctcccgtctacgtaccgctcacagtctactgatgttcaaggatggttttggaggttgggcctggtagaataaactgagtccaacacctctacacagttatgttcaactgggctctctgataccagcagcaaggtggcggggtttaggttgttgcaaacttcaatggttatgcgaggattttcacatagcaagctttggtacttggttaatctagcatttgttaaccaatgatgtcctttggtagtcattaaagttaccacagcatgggtggcctgtatattcaggttttgcccaagggttagtttatctgcttcttgtgctaacacggctgttgctgccagggcgcttaaacatgggggccagcctttggaaaccccttctagttgttttgagaaataggccattggtcttggccagggccccacagcctaggttaaaactccaactgccattttttctctttttgacacatagggtgtaaagggtttgtcaggtcaggtagaccccaggctggggccgacatgagtttttcttttaactcatgaaaagctcgttgctgttggttgtaatagatgtaatttatccaatttatatttttattaactgtcacctaccaaaatattgactcaaatcctgcagctatttgatttcaagatttaaattgatctggtattctccataggactccagttgtgtctaaatcgacatgagagtcaaaagacccataaggggcttctctcgctttatgatgccttattttttctccttctagttgatgaaatgccagggtgaaagggatagccaattggactaaagtacaagtgccactccagttattcggcagagtgcccagtaaaggtccaccacaataccaccacacatctgctcggggatgaacaagggctgactgattgataagctcttgaaaatttttaagctcactacatcccttcaggtctctaaggaatgctaagtttcctccctgtcatgagagacacgaagtgaacttagtgttgggagatggaggctggatggcccttgggggctgacccgctgaccgcagggtgccagatatagcagagagagcttggcacgacttattactccagactgtagaatcctggaaaagagctaccaggcagcccatgcctggtcgactggaggaccaccttagcagaaagggaacaatctgggcctctggcctgccatgtgcacaagcataacaattgcttttgtttaacatgtggatggaaaatttgatccattccaatgaggcatttgcatcctggtatgctgtcttaattgccaaagtttgttttaagtctttaacttctatgatcctctagtaaaatgagtgtatgattttgggaaattacacaaaccggttggggcagtccatccttgctctttagtggtccacagaatgttggaccaactacggcataaaagctctacattggggagcaagactcctggttgacactggagtctttatcgaaatttccccagattaaatggtcctaatttactaatgcccagtctgaggggagtcaggagggacagaggtacttttctgaagtagagagctgtctttgacttggcaagtccccacagggtataacaaggcaaacattaaatgcaatagtttgaggctaaatcgacttggttatgttaataaccagatggtcagcaatagagcaagaaaagaagaaagagtaatagaatagatgaatgagttaaatttttcttagctttagtttggtagggttttcccctgggacagtggcccacgactctggagggggtggcgctttgactcgggtgtgatgagtccatccctttttcgctgtatgaacagcagtctcagaggttaacagcacaaggtagggtccttcctaggctagcctgagtttttcttctttccaccctttgataagaaagtgatcttcaggctggtgctggtttactggaaattctaggggtggtacctgtgctaaaagacttttagttttgagggaaaggaaagtggaagataaaccaagtatataatttctaagaaattgactttttgttgtaaatgtggggacatcaacagtggactttatagtctttggtgacttcttactgagaaatttcctttagcacctatttgtattagtttttagaccaaagaaagccaaacaccattttatatttaataatgcttcttgtatgatttttatactagataaactaaatttcacctttatattagtgtgctattaatgttaaatttagttttaataaaactttgtatacatatttattcaatttttaatgtcggaccataaggtaagatttttatagactctttttaaccttttataatttttgttaaagagcaggttagtgctttaagaaaaaccagttgtgtttttactttaatgtccagttcacagaaaaactgaatgatacccctttaactttagctaatatgcttacacacaggattttctttacaattaacgttttaaaacttgcttaaaccttcaaaacaaaatttttttaaccttttaatgtaggtaaaaatttacattcttatgcctccttataatccttttaccaaaggtatattttactttccttatacaccttgcacataaactttttttttcaatagttttacattcagaaggcctagttacctttaaattatacaacatttcttgcataatttttttaacatttttttctttcacgacttttgcagacaattctttgacatgtcttaactttctgacttattacaaacatttttttaaaaacaatcagttaatttatttcaggacaagagtttaccatataacactctttttacataaattctgccccctctttttttccctttttttttcgaagatgataatcattcttttccaaagcgaacttcttttatgtctgtggactagactaaggccacaagattagaagttactataatacatattacactgttaacttttagcaaactttacttttgttgaaaaccttgtaagtttgggattttaattatcctttgctattaataagaccttgttttgtccaaattaacttagaattggtatagatggctttttttttttccttcaattacctgggaggaaacatccatcatcctgtcctgaagggagttcctcctaggtctggttggacctttgtatggtaattaagatttagatcccctgttaggaaacctgctgggttaagggaattttcagtggttaatgttaaatcatccttttttttttttttttttccttaggatacttctgaactggtgaggtgtgctcacaaggaggtttcctctaaaagttattttttttacttttttctgttagcaaagcagttaccgctacagattgaatgcatttgggccatccgcgggttactgggttaaggatttttgataggaaggcctcagtgctttcaggatacacccttgtttacactgacagcgaagtggtattggagtgttacagggttacagagaataccttcaattatcaattataggttttaaatttaccttggcttttaaaggactagggtacactgttttttttcttaactgcttgtatatctctttctttctctctttgattttctatctctttttctctttgacttttcttttgcgtctctttctctctgcctctctctttctatctctctctctccttccttgactccctctttgtctctctctcttcctctttctctctctgctggtctttccttgcctctgccagctgcttatgctgctgttctttcaaccactgtggggaggtgggggttctaaaaccagctgtaaccaagtgtctatgtatgggaactggtctgggtgccctggctgacaggttaccttgtgccatacctttgaaacaagggacctgtccaggcttccttctgatggccaacccacctctaatgctggccagactatcttccacaaagttttaagttttcatggtgtcatagtactccatagtctcccttaaatcctttcttgaaaattttcaacatagttcctagtggggtgggcttactttgtgcctgacccatgcttcttcaagacaaaacaccatactcacaccaaacgcacaccacaaaacaaagaacaggtaaaaaggacacccacacacttttacagtttacaccaaaccagaatcaaaaacaaaatcagagtatcaagaaatccaagccaggtcaaaaccaaaaccaaaccaacgtaccaagcaatccaagtcaagtcaaaaacaaaaaccaaagtgccggtacaggcacactgtgggtgatcaggccacgcttccactcaaatggagtgggcaagttccaaagactagtcttaccaagtttcagatgtctggactccaagtgccagttccttcctggtgttcagccactgcgttgatcctccatgggggcctgccacatgctgctctggcaaggcgttccaccggggcaattgcttacctgggatcgctctcaggatccgcatcgctcaagctggctggagtcccccgcagggatgctccacagggcaggcctaagccacctaaggggctgcctcaaccatccattcatcaccatgcttcccggtcagggaaccaagaaatgaagcgtgacaagctgcagacaaaacccctcagacactgagttaaagaaggaagggctttattcggctgggagcttcggcaagactcacgtctccaacaaccgagctctccaagtgagcaattcctgtcccttttaagggctcacaactctaaggaggtccacgtgagagggtcatgatcgattgagcaagcagggggtacgtgactgggggctgcatgtaccagtaattagaacggaacagaacaggacagggattttcacagtgcttttctatacaatgtctgtaatctatagataatatgaccaattaggtcaggggtcgatctttaactaccaggcccaggtgtggcgctgggctgtctgcttgtggatttcatttttgccttttagtttttatttcttctttctttggaggcagaaattgggcataagacaatatgaggggtggtctcctcccttatcgccatgttgaccaagctggtctcaaactcctgaccttggcctcccaaattgctgggattacaggcatgagccaccgcgcccagcccaacactttaattttaattgcgtaagactctcttcagacttctggcctccagaactgtaagacaataaatttctggggttttaagccactacatgtgtgcaatttgttccagcagcaataggaaactgacgcactgcttctttctcaggactagatgcaaacctccaggaggccttctgcaacacaccttgggtaggtgcctctcccctagccttgctcacacagcactggccgcactgcaggccattgtcagtctcagggttggtgttttctcctagacagtgagctcattgagagcagacaccatgtctcattcatatcatgcttgtcagcaagtagttactcaatgaatgaatgctgaaccaatgaataaaaaaagaaagttaaattagatttggtttaacactgggtctttatccaagacttcacagttgactttagttcttgactttgacccaagaaaagtaaaatattacaccatccaaataaagatttttgtcctatcctcttacaaaagcaaggctttcacagtttttttggcagttgctgggattatggcttagttttcaatttggggatgtaagcaagaaaatactgatcatttaaaaacatgtctgcctgtgcctgcagcaattgttagtcgtgatcgagataattttactcagctgggtgtggtggctcttgcttgtgaatcccagctctttgggaggctgaagcaggaggatcacttgagcccaggagatcaaaatcagcctgggcaacacattgagatcctcatctctacaaaaaaagaaaaattagcccagtgtggtggcatgcgcctgtaatcccagctactcaggaggctgaggtgggaggatcacttgaccccaggagttcaaggctgcagtgagctatgattgccctactgcaccactccagctccagcccaagtgagagtgagacagtctcttaaaaaaaaaaaaaaaaaaaaagataactaaaagataatttgactctacacagcagttcaaatcaagttccttattttcactttcagtttgagagtttgagaatgagaaacatccgtgtttagaacaatttttattagcctttttttttatattggctactggatctaattggcttgattagcagaatatacacattctgttccaagtcatttcaatatctttgaaaattgaaacttccttcctcaacttcctctccccttttctttctgtggctgccagcggtctctcttttttttccacctctccttcatgatcactgcatttcttattagacagctcagttctcaaacacacagtgaaggaaattctttaaaagggccattttttatttactacttggagacagtcaattacaacagagagctatgaaaaattacaccagagaaaagggatttgctcaaggtcattgacagaaaaagcactagggctggattctttccagatctgacactgaagttgattccaagcctaagtaacctctttgcactcattttttttacagtgaaaacctcatcaaacacattagttcctgtaactgattgaagcctccctcaggcatgttaataaaaaattttattaagagaaataatatacaccatcttagaaaataatataagaaaacagctttttttttttttttttttttttccgagactgagtcttgctctgtcgcccaggctggagtgcaatggtgccaccttggctcactgcaagctctgcctcccgggttcacgccattcccctgcctcagcctcctgggtagctgggactacaggcgcccgccaccacgcctggctaattttttatatttttagtagagacagggtttcactgtgttagccaggatggtctagatctcctgacctcatgatccgcctgactcggcctcccaaagtgctgggattacaggtgtgagccaccgcaccaggccaaaaagagcttttttaacaaaagcctgttctctgccctcactcttcctcccactgctatgccccaaagaaaagcttttttaaaagttgtggaaaaatagacataaataaaatatatcattttagccatttttaaggttatggttcagtggcattaagtatattcacattggtatacaaccattaccaccattcatctccaaaaacctttcaccttcctaaactgaaactctatacccattaaacaaataataactccccattcccccaccacacccccaacccctggcaaccaccattccactttgtctctaagaatttgactactctaggtgtcgcatatgaatggaatcatacagtatttattcttttgtgtttggcttatttcacttagcacaatgtgttcaaagttcatgtggactgtagcatgtgtgggaatttccttccttttttgaaagctgaatagtattccattgtatggatctactgcatttgtttatccattcaatcattgatgaatatttgggttgtgtctgtcttttggctattgggaacaattctgttgtgaacattggtacacaaatgtttgttggagtcccgactttcaattattttgggtatatacccagaagtagaattgctggatcatataactcatttttaattttttgaggaagcaccataccatccactgtggtggccccattttacattcccaccacccaatgcacacgtgtccagtctctccacaaccccaccaatacttgttattttctgtttttttgcgggtgttctttttttttttttgagacagggtcttgctctgtcacccaggcaggagtgcagtggtgtgatctcagctcaccgcagcctcaaactcttggggtcaatatatacatacatacatacatatatatatttatttggtgaaatatctatttaagtccaaagagaatcatttgaactattgtaacgatttctgatttatcttcttctgctacttgcctctaaatgacatacttattttgccagttttagattttctgtttgataaatgggtacttgcaccccatctctcctccctaagtgctggtactatagttttattattatttttgtacataatgacataccctttttttttattttatactctcccccaccccttccctctcaactactatcagatgtaacttccaaagttagtgatacttacatttacattctattctgtaactgtgactaggtcttctgtaggttgatgttatgaaagaaaaaaaatcaataaatggtgtttacattttgagcctgcttttgaagcacagaagcaagacatgggcaaaggggcgggaataagggctttctcatggtagccaatggcatgagccaaattacagggaccataaatcatgcaagtcacatgcagcataaaggagatgtgatggctcaggcagaaggccccttggggagcaacggggaatttaattggttaaagggaagggaagggaagctggagagcctggatggcccactgccctgctccccacttccttatactagccaaagaatgcgggtcaacgtgattcccccaccatgactcacggacttccaccagccgtcttgactttctcccagccctcctccccatccacagaaccagtgcctaccagggctttgcacaaataaaacaattctccctcctaaaaaaggtttgcaattcctacacagaggaaggtcttagagtgaagacacaagaggaaggagaggatggaaaaagaaacaatcactgaaaactggccgactaccagttctgtgccacctactcaattcttacccagccctctgcgtgaagttggtattattatccccatttgacagataacgaggctggagaggccccgtgacttgcccaaagccacaaagagactactggcagagctttggcctatgtttaagaagctgaacctctttgggattcagtttcttcatccataaaaacaaagacacattccaagccatgcctgttccttgcagggtgtttgtgagggtcagagaaaatgtccttgaagagcctggcatgtacaagataccctgaaactgatggctatgatgccacggcctgtgcacctaggaagagtcaggaaagcccagtgtcttgaaaagccgaggctggagcaaagttcaaggaggaactcacttctctcccactctaggactgaccctcaaactagccagaagagtggaaggacctacaagatcagtacccaccccacacttcataggccaagagagggacagtggtttacccagggtcacccagcatgctagaggctaagcctgccagccacggctgggaacccagacttgtgaatgccccagccctccacattccctggtccgctatcaaagacagttagtctaattaggaaagcacacccttgcaggcccagcctccggtgatctctttgttcctctgtctcttcctgccccaaccccacagaaactgaagtgtggggaccctccctaggaaccggggttccagggaggatttgaggtcacgctcaagatcataaagaggcccagcatggactccttctcatgacccaagtggagccagagttcccagataagggcaaaggtcacctcaggccaggctccactctcagccaccccttctgcctggcagggtttacttcatctcctccagtcaggagaggggaggtcacactgccagggcctttgccccattcttctccagctccttctctagaggaagagtcatggctaggccgaggcagtgtggacctggaacaggtataaactgtgctactctttggtgcccagtgccacttttcctagccaggaccagagctatcaccttctctgtcccgcagctctgcccaggtcttagtaccccactcacccctgggcctcaggaaccctaaggaggggcatagggttgctttccattcacacctggggcagcacagggaactgtgccacaggccccaagacaggcagatggaggatgaaatacacaggtcccagtccctgaggccaccttacgtgtccggcccccaaccctgtgcagaaggtcaaggcagaggcgccgaggagggatgggaggatgcctcctgtgagatggggtacaactggtgttccttctgaagctgacatctggcctcagctgggactctggcgccagcgggcccgcagggggctcacccgcgacaccctttgttctggctgcctccccaaccccgcggggccctctgctccagctggcatgcctcaaggacgcttcgcgcctgctcctttggcccccggctcgcaagtagcggggccagcacgtgacccgagggggcaggggatggatggatcttgaccttgccatctggcccctcacggatgtgctgctggctctccctctaggaaatcaacaaatttttgcgcttctaacatccaggcccctgaggatggtcgcgaggaagatctgtttcggactgcagctggggccttcggatccagaggaaaccagggctattcttcgagggtgggagggggagggccgcggggtcggaggggaaggtggccccgcgcgaagtcgccgccgccgcgccccgccccgccccgccggcggagaccgaatccgccgcaccccataggcagaggccaccctccccgcctccccgcccgctgcgcgcccgccccgccccggctcactttaaaagtttactcgggccgggacgcagggcaaagcgagccatggctgtctacgtcgggatgctgcgcctggggaggctgtgcgccgggagctcgggggtgctgggggcccgggccgccctctctcggagttggcaggaagccaggttgcagggtgtccgcttcctcaggtactggccccccgcgggaagagagggggcggggcagttccccgggagaggaacttggaggtcccggcgagcttcggaagccccacctctggacgagtgcactggggggaaggtacccgcccctcccccgccccccgccagcacctaggcaataggaaaagctggcttggcctggtggacttgggtggggagggggctttggttggtggctgcagtgacttcgagttctggtccaagactctcgattccttctcctttatgggcacagagggcaaggagtgtgggctttaaggagaatattccgatggggaggggcaagggccaaggcctgggctgtacccccaggacactgcctctgagttggaaccccttcatgggcaaacttggggatcagccccagtctccccgacccaggccactaaacttagcagtctcctgtctcctcatcagctgctcactaacatggctttaattctttgctgcctactcctgggcctatttccttctgtcctcagtgcaaggggtgggatggaagctggcaggcagaggatttcagttcccagtagcttcactgcctctgcagcagcacagtaagtaaagctgccttcccggtgtgaccagtccttgggaggaccccgtgagatggcaaatgtgaaagtgcttgagacacagagagcaggctgccactcatgttatcagggctgttagcttcagcagcaccactggggagccctgtgcactactgagcctgtcctaccactcaactcggccagatactaagtctatggtcaggacagcactttcagcaacatcagatggggtgtgggcctggacatggaaaagggagaagtcagaacaaagctgtgtctcagagaactagatttgtttttgtttttaaaaaggctaagtaggaagagttggagggacatgcagactcctttttggctagaactccaagatcacactttctgaacttgctgatttctgaatgctagaaagcatgcaatgccttaacatcactctgcctaatttgctgagaaaactaagtggatcaaggctggtcagtagatgggattgagatgaggacagtggggtcctcttcccagtgaccctgggaagtcactcactacttcccagggtctccctagacaagttcggccctcccctgaccccctagtctcttaagcctctcctctggactcatggctgccccctcaggctgggaggactctgaggaaagttacttcccaaagtgtacatattttatcacactaaatcaggccacaggggaagtctctcagcctactctggctcaggaggctgcccaatagaaaacaaacaaacaaaccaataaataagtaataaatcaggccacatggcaacatttctgacctttgacttttttttatctataaacaaaacaggtcacttacctgctacagccctgggacctctgagagcaccaagcttcagagaaattcttattgctgtgtcaggaggagactcatttatccagacagatgattttctgagtgtttggcctactttctttctgccccttccactcccttgtgcctgcacccttattgtctgactgtgatggttttacctgatttctctcctactttccccttcagaagcctcagggctcaggccaggcaaggtggtttatgcctgtaatctcagcactttggaaagcagaggtggtaggatcacttgagcccaggagttcaaggctgcattgagccgtcatcatgccactgcactctagcctgagcagcagagcaaaacctagactcaaaaaataaaaataaaggctgggtgggtggctcatgcctgtaatcccagcactttgggaagcccaggcaggcagatcacttgaagtcaggagaccggtttggccaacatggtgaaaccccgtttctactaaaaatacaaaaatcagccgggcgtggtggcatgtgcctgtaataccagctactagggtgtctgaggcaggagaattgctccaacctgggaggcggtggttgtagtgagccaagactgcacctctgcactccagcctgggtgacagagggagactccatgtcaaaaataaataaataaaaataaaggccaagcatggtggcttatgcctgtaatcccagcactttgggaggctgaggtgggcggatcacttgaggtcaggagttagatcagactggccaacatggagaaaccccatctctactaaaaatataaaattagcctggcgtggtggcacatgcctgtaatcccagctacttgggaggctgaggcaggagaattacttgaacctgggaagcggaggttgcactgagctgagattgcaccactgcactccagtctgggtgacagagaaagacttcatctcaaaaaaataaaaataaaaatgaaaaaagaagcctcagggctgaaaccatcagcaaacattcctgagaacagattctgcgtcatgctagcacatgctgtgcatatagaggccacagaactcagtcctcaccctgccaggaacttgcagcctcgtaggaggagaaataaatcaaggtgagcactattcggtgttgcaagtgccatggtgaggaatgcgcttggactttcgtcctctgttttctccgatctgctcacacacagcctgctttcctgttgcccaacacccaggcctattacttaccagaccctggttttgcctgagagaaaagagcaagggctttgaagttagactatcctggatgacagccctgggtcctctccctgttggttgtatgacctcgggcatgttatctaacctctgagctagttagttcattacttactaccttcttgctgtgttgttgggctgatgaataaaacaagcttgctcttgttctcagcctttcctttgaggcagggctgatccctggaaacccttgactggtgtctgggtgggaattctgactgatttgaaagtaggagaggatcccctgattggtggcctctttctggaacccaattatttctcctagctgattgccaagatggtgacttccacccagctacatgtccagtccttgggtctgctggacgtcctcctctccgtttgacgcagggctgttcagagtctttctctttttcttttttttttatttgaggtggaatttcgctcttgttgccccaggctggagtgcaatggcatgatctcaggtcactgtaacctccgcctcctgggttcaagcagttctcctgcctcagcctcccaagtagctgggattaccggtgtgcgccacccgcccagctaattttgtatttttagtggagatggggtttcaccatgttggtcagactagtctcaaactcctgaactcaagtaatccacctgcctcagcctcctaaagtgctgggattacaggcgtgagccaccacgcccggcccagagtctttctccccagaaggaaagaaaaagctgtcctttgctctccagaactcctcacgaccaactccttccccctatctatgtgcctccttccccaaagaaggtggatggcttagtctggggcttcagtgaacctccaaggaaggaattcaaggagaaacctgggctgagcaggcttcccccagacctgccctaaagctggcctggggctgcctatgaggcagctgcatccagggtgttgagaacactcagagctgggaaggcagagagatcagtggctaaagcctctcagaattaggtgtggtgctcagagctggggatccagtgacttggtgctgatggtggggacagaggggtaagggggctttgtggaccaccctccatggggatggctatgatcatataagactgtggacctaagggaaaaatctgaggccaaagtaatataagtagagagatttatttgggccatgtttgcagactgcaaccgggagcatagactcaagttgccctgattatatgatctgatgagcagcagttacaagtgggtttttaaaagaaaagaaggctgggtgcagtggctcacacctgtaatcccggcactttgggaggccgaggcaggcagatcacaaggtcaggagttcgagaccagcctggccaatatggtgaaaccctgtctctactaaaaatacaaaattagctgggcatggtggcgggcgcctgtagtttcagctacttgggaggctgaggcaggagaatcgcttaaacccgggaggagaaggttgcagtgagccgagattgtgccactgcactccaacctgggcgacagagcgagactctgtctctaaataaataaataaatgaaaagaagagacagttcctaagtgatttaccaagaatgtacattaaaatgatataagctattgattcattatactttgttctttgtatcacaaattttgttaacatgaaagtaatgggtaaagcagctagttaggagcaaaatgcctttaaacaattgtccctgggaaggaaggagcatgactgaagtctcatgtctctctgggcttgacacattttgcatacatcacatagctcagacagctgctgagctatttttctgttcttgtgaccaacagtttacacacacatggaaaactacaaaatgctgtttctatacaagcgccttgtattaagcctggaagtgttatgggtggtaaccataaatagttacaagaaatagactcttcccataatttccaaaacatgatttatgaatgatttggtaacgatatccctatgcattccactggggatcctccagtctaaatgtaacagtagaaaataactatgaacttggctgctggaatcagtgaatggtacacatctgttttagttaccctcctctgctttgaatgctgtacattgctgcagtgtactgtgaagcatgtaaaggtaataaaaagatgaatgagtttgttttcattgacagagctgtttttctagaaggagtctacaggggaagtccatagacacactgattcaaggcagaaagtttgcagtgccattaaagatgtcaatcaaagcaggaggaatctggtttgtggaaatgggagggggagacttcccaaagagcctggggttagaacctgatccctgaaaggttaggtctgcagtttgaagcctttgtacttccgtgaaatctcacttgtgcttcaatcgttgtgaaccctggtgccatcatagcttgctataatctcaaacttctgggctcaagcattcctcccatctcagcctcccaagtagctaggactacaggcaagtgccaccatacccagatcattttaaaattttttgtagagatggggttatgaagtattgcccaggttggtctcaaacccctgcctcaagccatcctcctgccttggcctcaagtgctgggattataggggtgagctgctgatcccggcctctattttacttcaatctacagatgaaactttggagccaggcagatctggattcaaatgaaccactttctagctgagtagtttttttacttaagttaaacttgactttttttttctttctttctttttttggtggagacaaggtctcgctctgtcacctaggctgagtgcagtggcacgatcacagctcactacagcctcgaactcttgagtgatcctcctatctcagcctccccagtagctgggactacaggcctgcgtcactacacccaactaatttttgtatttttttgtagagatggtgttttgccatgttgcccaggctggtcttgaactcctgagcttaagttacctgcctgcctcagccacctcccaaagtgctgggattacaggtgtgagccacacgcctggccttgacttttcttatgtataaatagtgcattgtgagggttaaatgaggtcccataagaaaatgcttaacacacagtttgatgccaaggacatgttcatcccattgcatgggtcagtgagcaacctgtcctagtggtgagctattttacaggaatgcttgtgtaatgatggcttggcccattcttacagtgaccccaaggcccacagtatagtaactgtgtctggggagtaggagggagaaggttccagcagggtaaactacctaagcaaaggtggggctgctggagatgggtggacaggcctgagcttatgctgaagatgggaataaagctggtcatgcattcaacaggccaacatgcaggctgtaatttcatcttctgggttggccttgccatgggactgttctaataacgaagggtaggaacaattctgccagtgcctctccctttagaactaaacatgttgtatttctagcttacaaatcgtgctttataaacctcagtggcatgcatgtattcctccatttgggagttagttgacgggaaagcaaatcccagtcctaccagtcctaacttagtgtggctttaggcaagttactgaacctccgcagaccttagtttgtttgtaaaataggctgtttggacaagatgtgctctacctttgggagaagattctgtgattcctaaagaggctggagtttgagcctgatccctaaacccaataaggctgtgatttgaagtatgcagccttcatacgtgtgtgaaatttcacttggtctcttatgaaccctgagtatgcagcttcctaacctgacattctgtaattctgtagtcccctgagcaaaaagaagcatcaagttttgttttatacacacacacgcacacacacacttaaatatgtttttctttttcttttttttttttttgagacggagtctcgcactatcaccaggctggagtacagtggcgcgatctgggctcactgtaacctccgcctcctgggttcagcaattctcctgcctcagcctcccaagtagctgggattacagacacctgccaccacgcccagctaattttttgtatttttagtggagatggggtttcactatgttggccaggctggtctcaaactcctgacctcgtgatccgcctgccttggccttccaaaatgctgggattactggactcaaacaatcctacttcctcagcctcctgagtagctgggattacaagcacaaaccaccatgtgcacctggctacctcaaaggttttcttcctagaaaactaatatctagccttgtatgtattttagtaatcctatcaagggacaagtgtcttgactcagcccccatccctgattcctaggcactcttctcctggggtctctgtccagctattccaaaagaaaacctgcagcatggatgcctcctgactccaagtatttcaggctactctgtcacctgggatggagtgcagtggcgtgatcacggctcactgtagccttgacctcccagtctcaggtgatgtgcccacctctgcctcccaaatagctgggattacaggtgtgtaccaccatgccttgctaaattttttgtattttgttttggtagagacagatttccactttgttgccccaggtggtctcaaactgctgggctcaagcgatcctcccaactcagcctcccaaagtgctgggattacaggtgtgacccaccgcactggcccttctatgtcttcttgagagagttttctaaacccaaattatcacttcttatgtattttctgtacatacttacaaacacaccagtggttccattcaagatgctgaaaatgggccaggcacagtggctcacacctataactcagcactttgggaggctgaggtgggaggatcgcttgagcccagaagtttgagaccagcctgggcaacatagggagaccccatctctacagataatactttttacaaattagttgggtgtggtggcatgtgcttgtggttccagcttcctgggggactgaggcaggaggattgcttgagcccaggaagtcgaggctgcagtgagccgtgatcatgccaccacactctagcctcagtgacagggtgagagcatgtctcaaataataataataataataacaaaacaagatgctgagaatggaagcttccaccaatatagagtatcttgttcaaaatctttactgggctgggtgcggtggctcatgcctgcaatcccagcactttgggaggctgaggcaggtggatcacctgaggtcaggagttcaagaccagcctggccaacatgacgaaaacccatctctactaaaaatacaaaattagctgggcatggtggcatgcacctgtaatcccagctactcgggaggctgaggcaggagaatctcttgaacccagtgggtggaggttgcagtgatccgagatagcaccacctcattccagcctgggcaaaagagcaaaactccgtctcaaaaaaataattttttttttttttactgtagtccttactagtctttgtagtcgtttgtagtttgttctttgtagttggtatttttcagaggtcacatactcctcagggtggttatgtcgagtggtagaaagatcatggggctttatgatataattacatacagtaaactgcacagatcttttttttttcttttttttattttgagacagagtttcactgttgttgcccaggctggagtgcaatggcgcaatcttggctcatcacaacctccgcctcccaggttcatgcgattctcctgcctcagcctcccaagtagctgggattacccgcatgtgccaccacgcctgacttattttgtatttttagtagagatgggatttctccatgttggtcaagctggtctcaaactcccgacctcaggtgatttgcccgtctcggcctcccaaagtgctgggattacaggcgtgagccaccgtgcctggcctgtgtctggctttttttgctcagaagccaaggagtgcttttgggaggagcagctcattaaccttgacaaaaactcacaaaagtgagttttacgtattaaacagctcaatgtttcagagttctgtatgtattctagtattattcctttgtcagacatgtggcttacaaatgtttttccccactttgtagctttttttcatcctcttaaaagggtcttttgcagagcaaaattttttaatccttttttttttttaattttttgagaaaggcctcactctgtcaccctggctggagcacagtggtgcaaccacggctcagtgcagcctcaacctcctgggctcaagtgatcctcctgcctcagccttccaagtacgtaggactatgggtacacgccacaaagcccagctaatttaaaaaattttttcatagagatggatggcactgtgttgcctaggctggtctccaactcctgtgctcaagtgattttcccacctcagcctcccaaagtgctaagattactttacagacgtgagccactatgcccagcccatatagcaatttaaaaaaatttttttataaagtctaatttattaagtctagtttataaagtctagtttagtgagtttttttttttagatgggatctcattatgttgcccaggctggtctccaactcctcggttcaagcaattctcctgcctcagcctcccaagtagctaggattacaggtgcatgccactgcacccagcgctcagtgagtgtttttttttgttgtttgtttgtttttaatggatcttgcttttggtgtcaagcctaataactttttgcctagctctagatccagaagattttataatttttttttacacttaagtctgattcattttatttttgcttatatagaatgtgagacttagtcagagttcatttttgttgttgttgttgttgttattttttattttttttattttttatttttcgagacggagtctcgctctgttgcccaggctggagtgcagtggcgcgatctcggctcactgcaacctccgcctaccgggttcacgccattctcctgcctcagcctcccgagtagctgggactacaggcgcctgccaccacgcctggctaattttttgtatttttagtagagacggggtttcaccgtgttagctaagttggtctcgatctcctgaccttgtgatccacctgccttggcctcccaaagtgctgggattacaggcgtgagccaccacgcccggcctgttgttgttattattttcctgcgacagagtttcactcttgttgcccaggctggagtgcaatggtgcaatctcggatcactgcaacctctgccttccgatttcaagtaagttttcctgcctcagcctcccgagtagctgggattacaggcatgtgccaccacactcagctattttttgtatttttagtagagacagggtttcgccatgttggtcaggctgatcttgaactcctgacctcaggtgatccacctacctcggcctcccaaagtgctgggattacaggtgtgagccaccatgcccaggcagttcttttttttttttttttcctgaggctctttttatgcttttaatggccctcatgcattaaaatggccatcaattaagaaaatgaccatttagtagtgatctttttgggattttatttgtcacaacagcacctttgtcttgaacaatagttgcacattgtaactagtataaatatatcacctatttattcaggtacataaaaattataattttatttcaagataaaacagctattacaggttcagactcagcagttcagcattgtccttcctgcacaagcattggccatctctactcccatatcaacgaccactggaaggtcaaccactagcctagtgtctgtgcaaattaggcaaaggagccccccaagaggatgcagccccatggcatgtggcttggcgagtggcacatggactagaagaatgagatcacaaaactttcagtggtgtgcaagggagacgggaagggagagcctgcctttcgactgccatgagctaggagatatattggaccaatgagctataacacaagagtgaatatgttgaatgaggactgaggacttagctatgagtacagcatgtgaatttcatggacaagtgagggctcttgcttattgcataaatgttggtcttggctaggcacaatggcttacgcctgtaatccctacactttaggaggctggagtgggagggttgcttgaggccaggagtttgagaccagcctgggcaacacagcaagaccctgtctctactaaataaataaataaataaatcccagctgagcgtgtggctcctgcctgtggtcccagctactaggaggttgagacaggaggatcacttgagcctagaagtttcaggctgcagtgggccgtgatcacgccattgcactccagcctgggcaacagagtgagaccctgtctcaaaaaaaaaaaaagttggtcttgaccttgaccctttacataacaggcgctgtgggtctcctgcccatgctaggaagttgcttcatcttttggatattgtagacacccttagtaggagatcatcaagctccttgtattttccctcttaaaactttcatgtgaaaaaaaatttgaaacacaattacatggaaaaataacaaacacctgtgtgtctgacagggaataaaaatttaacctttcttgttttcagaaaaattataaatgaaagaaaacactacagatcaaattgaagtcccttttctgtccctcctgcagctgacccccaccagagagccaccatcataaatttaatatatgttgtgctgaagcacattttatacttttagcatgtctctgaatccataaatagtacagttgtcccccagtatctatggggggttggttccaggacctcccttgtataccaaaatccttggatgctcaagcctatgatataaaatggtgccatataacctatgtgcatcctcctatgtactttagataatctctagactacttataatacctaatacagtatctacacatcacttcatttgtgtggattcaacatagtacttagtaagcagcaagctcaagatctaagatattagttttacctgctgtatagcagtccatcctatgactgtatctctagcagtgaaattgctgtgctgaagagttgacattttcagcttttttacgtattgctctggtgagactgtgctaccgtgaccaccagcagcaaccaagttttgctgtttccccacatccttgcaaatatttagcattgctggactttaaagtgtctgctgctgggctcagtggcagtttgcttttcagaactttgtggaatttttttttccaaatatttttctttttctttttttttgggagatggagtctcactctgtcacccaggctggagtacgacagcgctgtctaggctcactgcaacctccacctcccaggttcaagagatgctcctgcctcagcctcccgagtagctgggattataggcgtctgccaccacacctggctaatttttggatttttagtagacatggggtttcaccatattggccgggctggtctcaaactcctgatctcaggtgatccacctgtctccgactcccaaagtgctaagattacaggcctgagctaccatacctggccccagtatttttcaatctaaggttgattgaatccacagatgcagaaaccatggatacagagggctgactatatcttgtatcatttgatctgtttttaaagtttatatttgtttaaacatggaaagtacttagaatcatgttatgtgagtaataagtgctcttagtcttggatttttttgtgtatcaataaacaatacatattttatgccttttttttttcaagagacagggtcttgctgtctcccaggctgctggagtgcaatgacgccatcatggctcactgcagcctcaacctcctgggctcaagtgatcctcccagttcaacctcccgagcagctggaacgacaggtgcatgctaccacacagctttttttttttttttttttttttttttagagatggtcttgctatgttgcccaggctggtctcaaactcctgggcacaagcagtcttcccactttgacctcccaaagtgctgggatcacaggcatgagccaccgtgtccagcattattatgcttttataatttcagcaaaaatagtatcatagttcttttcttctttcatacagtagtatgtgtgttacagatctattcatctcagatggacataagttgagacctgtagatctaagttattggttttacctgctgtatagcagtccatgctattactatatctctagcagtgaaattgctgtgctgaagagttcttttttaggtattgccctggcgagactgtgctactgtgaccaccagcagcaaccaagttttgctattttcccacatccttgcaaatatttagcattgctggactttaaagtgtttgctgctgggctcagtggcacgaccctgtagtcctaactactttggaagctgaggtggaaggatcacttgaggccaggagtttgaggccagcctgggcaacatagacactattgctaaaaaaaagagtttgccgctctggtgggggtgaaagagtatctcgttgtggttttaatttatacttccctgattaccagtgagattgggcatcttttaaaatgtttattggtaatgtctcctgtgtctgttctgttcctattcattgcccatttattgtgtgagattatttgtccttattgatttgtgttttttaaaacacaggctaaatattaatcctttgtctcatatataaaatgaaatttataaatccaggctgttgcttgtcttttagccttgttgatgatgtatgtttctctgtggacctagggaccagcctcccatggggggtaaggagcagaggccagtccatggcttggaacaaaacaggatattgctttcaatttaattttgaaagcctcactggtggctagctagtatggcaccctccccaggaagcagggggtggcctcagcatggggactgttcctgcagtctctgggcccctcacaaatcaaggttctgagtccttcatcctccctccccagtggcttctgaagaggccttgcccagggcctgaggcatttccaccccccgacaggggcagggtccacctgtaaacctctggcccaggttccaagaacctctacccagcaggtaatatgtaacaggaggcaaaacaaacagcttctcctcttatgttctccatggcagacctgtttgcccaggcatttgcaatcctccctgccaactgtggctccctcagagcccagctctgcctgtggtctctacatgaccatgtcagaactgtgcaatcctttgtgcccagtgacctctagcccccgactttagttgccagccctgagtgtcacagaatgccacagctatttcacctgcattgccctgaaccagctggctcgtgttttctgtccagttcctgctggtaggcaaggctgggctgggcagggctaatgctggggcagaaggctttccaggtgggtccgaccaggtggctgcacaggtagggtgcagagccactatgggttggtgccaggagaggtgagctggctcacaagagcagaacaatgagagaagaggcagcaaagaaaaagaatcagataccacaaggagatggaaaagtcagtgtgtgctcaaggactgccaagtgggaggcctagtgggggcagctgctgaaggggccatcccgggaggggctccccatggactggaggcactcagacggctccccgtcagcctgcagggcccccagggcaggatgtggatgggctgcagagtaaagagtagtactcttggaaaagggtccagatttgccacccatcagggtcagaaccttaagaaaatgaactacttgcttcttcatccttaaaaagaaatgatctgagagtaatgtgagaatcatatgagacacccaggctgtgcagtggcacgatgtcggctcactgcagccttgatctccccaggctcaggtgatcctcccacctcagcctccccagtagctgggaccacaggtatgcacgaccacacccagctaaatttttttggtgttttttgtagggatggggtttcaccatgttgcccaggctggtctcgaactcctgggctcaagggatccgcccaccttggcttcccaaagtggtgagattacaggcgtgagccaccatgcctggcctggcggtcctttttaagtcacagggctctgaaaagattcatgttgtattgtattggggtcttggaagccaggcagtcctgggtttgaatcccaggttggctgtttacatgctctgtggctttgggtgaggtgctgcatttcttggagcctcattccttcatctgtaaaatgggtatgtatcttggtcagggagtggttatgaagatcacagatcaggcatgcagagtctttgaagagagctggcatgaggacacagcaataaacatcagctcacatttttctgaaatctgctttatcacctacagtgtattagacattttccatgtcattaaatgttgtgtctttatttatttatttatttatttatttttatttatttattttgagacaggaccttactctgtctcccaggctggagtgcatggcacaatcatggcttacagcagcctcgcccttgtgggctcaagcaattgtcccaccttagcctcccaagtagctgggacacagacacacaccagcatgcctggctaattaaaaacattttttttggctgggcacggtggctcacacctgtaatcccagcactttgggaggcccagatgggtggatcacctgaggtcagaagttcaagaccagcctggccaacatggtgaaaccccatttctactaaaattacaaaaattagccaggcgtggtggtgcatgcctgtagtcccagctatttgggaggctaaggcaggagaatcgcttgaaccctggaggcagaggttgcagtgagctgagattgtaccactgcactccagcctgggtgacaagagtgaaactccatcccaaaaaaacaaaacaaaacaatttttttttttttttttttgtagagactgggtctgctatattgcccaggctgatctcaaactcctggaatcaagtgatcctcccgccttggcctccaaaagtgctgggattacagccatgagccactacgcctggccttttagtttagttttgttttagagacagggtctttctcggtcacccaggctggcatgcagtgacacattcatggctcactgcagccttgacctactaggctcaatcaaacatcctgccttagcctcccaagtagctgggaccacaggtgcacaccaccacacctggctaatttttaatttttttgtagagacggggtctcaatatgttgctcaggctggcctgagctcctgaattcaagcgattttcctgccttggcatcccaaagcgttgggattataggtcgtgagccattttgcctgaccatgtcttcattttttaatggcagtattgcattgtatatgctctctaatttagttatctaatctcttactcataggaataatttttttttcccagttctttgctaagtggcaattaatcatacctttaggcattttttaggttttatttcttttttttttttctgagacggagtctcactctgttcccagactggagtgcagtggcgcaatctcggctcactacaacctccgcctcctgggttcaactgattctcgtgcctcagcctcccgaatagctgggactatgggtgcacgccaccatgcccggctaatttttgtatttttagtacagacagggttttaccatgttggccaggatggtctcgatctcctgaccttgtgatccgtccacctcagcctcccaaagtgctgggattacaggcgtgagccaccgcgcccggccaggtttttgtttgtttgtttgtttgttgttgttgttttttagaatagatccctaaaagtagaattgccaggaggccaaacagcttctccccttagattctccatggcagacctgtttcaaaaggtatgcatattcagaatgttagtagatattaccaaatcagaaggaatccagatttacaggttttgaagctaacacagtttgggatgccctctttctaaacaagaataaaaagctcttaagtatcagattttgtgcaaactgaagatcgatttagaataagaaaagaatttgctaccaattgctgcgagcttgaagattctcttttgagctctctttaagcaatttgtcagaaatgctgacagataaatgcttcttgatttgcagccagctttccctctccaatttccaggcacgcccagcactaggatggtagggaggggccaggctggggggcatgctaaagtgtaagtttcttaggcttcctgcctctatacttaccatcttctaaaaatcttataccagtttacactctggtatatttctccacatccttgccaacattccatataatcaataactcctgtttttatgttgaaattcatagccattttattaatcttctctacttggggagttttttttaggccctattgaatgcagcgtgatcatctagtgctctagcttatcttaaaataacctctcccactgattgcataaagccagcaagaacatgaacctacttgggttacaaggattaactcttatttagctgcaactgctttctagtactgcttatgaatattctttgacaaaagtgcctatcatggaaatttgaaattaaatatagactcctctagaaagacagcaatctttggtttgggtagaggattactgatttgttctattttctcttcttgtaatgtttcatttattacagtatcagacaggttgaattattttatatctatatataatttttggaatagcagctttttggccccggtggtgtaataatctagataagtgatcaaaaggaattgagtttgaaatatcagccactggctgggcgcagtggctcacacctgtaatcccagcactttgggaggctgagatggacggatcacttgaggtcaggagtttgagactaacctggccaacatggcaaaaccctatctctactaaaaatacaaaaaaattagttgggcacggtggtgcatgcctgtagtcccagctactccggagggtgaggcaggagaatcatttgaaccagggaggtagaagttgcaatgagctgagatcgcaccactgcactccagcctggcgatagtgtgagactccggcccaaaaaaaaagaaaaagaaatatcagctgctaaaggatcagagactagatatcttccccagcccccgagtttctctctctgcaaacacacacacacacacacacacacacacacacttttgccaccatctgaaaataagttgcaggcatcataatatccatatttttcatctttgcttatctcgtggggaacaaatgcctcatgtttgtttttctttgatctgtgacatgggcacctcttcctatgcttactggccatttgtcttccatcttctgtgactttgtggcagatttggtcattattgtcttctgtgtgtaagtgtcacttggtctgttttggtggaaaaatgtttgcaattagataatgtggcttttttttgagagattggggctcactctgttgcccaggctggagtgctgtggcataatcatagctcactgcaaccttgaagtcctgggctcaagttatcctcctgcctcagcctcctgaatagttgagaccacaggtgcatgccactacccctggctaatttttaaattttttatagagacaggatctcactgcattgcccaggctggtcgtgaactcctggactcagggaatcctcctgcctcaccctcccaaagtgttgggattataggcatgagctaccgtgcctgacttacatgaggctgtcaatcaacctttttagcagcatcttggaccagttgcttaactttttcatctcagtgttctccatctttaaaacaggaataaaagtcctcatctcccacaaattgctgggacaatttgcctcgaaaacctgtatgattgcattacagaggagatactcagtgttccttttctcttctgttcagataccctgcagatttacccatctctgccttcctctctgagagtgcttatcttttcataaagcagaatcattacattcccgacgtgtcatcaaaagtgtctacaggctgggcatggtggctcacgtctgtaatcccaacactttgggaggccaaggcaggaagaatgcttgagctcaggaggtcaagactagcctgggcaacatagggagacactctgactctacaaaaaaaattttttttaattatctaggtctgctggtacattcctgtgttcccagctactcaggaggctgggataggaggatcacttgaaattgggaggtcaagtctgcagtgagctgtgatcatgccactgcactccagcctaggcttcagagcaagaccccatcctatctttaaaaaaaaaaaaaaaattgtaaagctgccctctggatcttgctggagccttgcattcagtaagccatattctaaatgaacaactatgcatcatcagctgctctgtgctcctgaacctgtagaacatgcatccacatctgaaacaggttggcagggctaacagtcacattgtaccatgactgtccagaaaacacagcctcaggaaggaaaagcctatgacattcaacattgggactgtttattttcttgagtaatttctaagacagagatcatgaacagatgtgttttcttggcttgcccagctttatttattaatgtatatattttgcacagatgtgctatgtgctgcttttatttttctgacagaatgttaaataggtactgcaatgttgctaaatttagtttattaattatgactacattggcagtagcttaagccctagaaggtttttttttttaaaacttcgtgttgaaatatatgacagattcagaaaagtacacttttttttggaggcaatcttggctcactgcaatctccgcctcccagattcaagcgattctcctgcctcagcctcctgagtagcggggattacaggcacatgccaccatgcctggttaatttttgtatttttagtagagacggggtttcaccatgttggtcaggctgatttcgaactcctgacctcaactgacccacccacctcggcatcccaaagccaccacacccagccagaaaagtacacatattttaaggcccacttgatgtacttttgataaagtgaacacacccatgtaaccagcactcaaatcaagacacagaacatgaccagaaaccaggagttccctcgtgacctctttaagtcactgaccctcaccaactgaccattctcctgacttctaacagcatagattagttttgcctattttgtacgtataaatggaattagacagtataccttttaaaatctggcttctttcattgaacattgttttatgagattcagattgctgggcataatcatagttcctttgctctcattattgtataattacaaataagtcaccacttatttatctgttccatcgttgatggacatttgggtattttaaatattggaaatgatacaaatatcctagtacctgtcttttggtgagcacatgtttgatttctattggatatatacctaggagtagattatgcacattattttttaagtgtacattcaatggcttatagtatattcatagatatgtgtaaccatcactatagtcaattttagaacattttcatcacctcacagagttaccctatgtccttgtagctattatctctctgtcttcccatccctcccagcactaagcaaccacttaatctgttttctgtctctatagaattacctattctggacatatatatggaatcatagtgtcttgtatgattaaaataaggatggccaggtgtggtggctcactcttgtaatcccagcactttgggaggttgagacaggtagatcacttgagctcaggagttcaagaacagcctgggcaacatggcgaaacccagtctctaccaaaaatacaaaaattaaccggatgtggtggtgcgcgcttagagtcccagctactcggggggtgctgggacaggaggatctcttgagccccagaggcagaggttgtagtgagccgagatcgcgccactgcactccagcctgggccacagagtgagactctgtctcaaaataataataataataataataatgagatgatcaaagtatgatttcacgagtcacacagtttattgccatacaaagagtttttttctttttttgttcacagtgcttaaagcggggagaataagaaaacaaatctcatagggaatacactcaatagaggaggtcccttagccacatagtgagtgagttccagtctgttagaatccaattattaaagtctaattgctcacttaggatgaaagcaagcctctgtggaaagtagtctgactgacgcttgaggcgtacctttatagagagattctcagctagatggcttgaccatcctagagggtataccggagttggtgaagctttggaaattagctcaaaggctgatagggtgtggccttagctcagcctgagctttcactcttcagagaagcgctcagagtgtagccctgccacagcccaaggtctcaaagtgtctgtcaaactcttgggtttatatgtacagtctggcgttgcttaacaacgggaacacattctgagaaatacatcagacaattttgtcattgtgcaaacatcatcaagtgcacttacacaaatctagatggtagagcctattacacacctagagcctgtgctcccaggctgcaaagctgtacagcatgttactgtcctaaagactgtaggcaattgtaacacaagggtaagtagtcgtgtatgtgaacatatctaaacgtagaaaaggtatagtcaaaatacaatattacaatataatcttatgggaccactgtcatatatgccatccatcataagccaaaatgtcattttgcagtgcatgactgtattttagagtccagtagctgaggtcagtagttcacaaatggggtctgataaggtgtgattgtgtcacattcacaaggggaggggagtacactccatgttcttgtcacagcaaaacatgtcactcccatagcaaatgtcaacataaataacaaacagaaaaaaagtcttcaagtataacgagtttaattgggaatgagcattgcaatgaggaatatgtatgccacagtaaactatgggcatattcacagaggtaaagaagacaaggatttttaaaggtaaaatgagggttacatatgttgtcttgaaacaattatcctcggctacaaggatcaaaaacaagggtggcatcagtccagggctggacaggcagttgctgggcaaatgtcctcacagaagcattttgtgtgtgtgtgtaagattgaggtggcctttgtgcaaggttgtggttttggcaaagtctcttgtgatatcttttgttatcaggcagtcgtgcaccagaaccctccctgcatgttcttacctggctccattttgtcagggtttgacacaagtgactccattttgattctaacaactttttcacaaactatgtatgtatttggaattatttcaaagttgtatgacatatacaatatgtagtctttttttttttttttttttttttggagatggagtctcgctctgtcacccaggctggagtgcagtggtgcaatttgggcctgctgcaacttctgcctcctgggttcaagcaattctcctgcttcagcctcccgagtagccgggactacaggcgcccaccacaatgcccagctaatttttgtgtttttggtagagacagggtttcatcatgttgcccagggtgctctcgaactcctgagctcaggcaatctgcctccctcggcctcccaaagtgctaggattacaggcatgagccaccacgcccggcccaatatatagtcttttgttactggcttctttcacttataaatgttttcaaggttccaccatgttgtaatatgtatcagtacttcatttccttttttttttttctttgagactgagtctcgctttgtcacccaggctggagtgcagtggcgcgatctcggctcactgcaagctctgcctccagggttcttgccattctcctgcctcagcctcccaagtaactgggactacaggcgcccgccaccacgcccggctaattttttttgtatttttttttttttagtagaaacgggatttcactgtgttagccaggatggtctccatctcctgacctcatgatccacccgcctcggcctcccaaagtgctcggattacaggcgtgagccaccactcctggctacttcatttcctttttaaaaattgctttattgtagtaaaatacacataacatacaatttaccatcttaactattgaagtttgcagtttagtggtattaagtacagtacactcacacttttgtgcaagcatcagcaccacccacctccagaactttttcatctttcccaactgaaattctgtacccattaaacgataagttcccattgccccctcctcagccccctctactgctagacagcttttaccttcagtttcttctttcacttaataaacgagagggtccgttgctgactaatgggattgcttctctaagtggaggccttttctaagtggaggccttcttgcatatatacgattgagtttatcctaaaaacgggtaacagaaaatgtggttgtagaaagacaagaggtggagacacaaactggccaagggttttcatactgggtgtcctatccacaggccacagcagccccaccgcagatctgcccgattctttggcatcaagaagttgatccagctcacgcctgtaatcccagcacattgggaggccgaggcaggtggatcacttgaggtcaagagtttgagaccagcctggccaacatggtgaaaccccatctctaccaaaaaatacaaaaattagccaggtgtggtggcacacacttgtaatcccagctactcaggaggctgaggtgggagagtcgcttgaacccaggaggcagaggctgcagtgagccaagatcatgccactgcactccagcctgggagatagagtgatactttgtctcaaaaaaaaaaaaaaaagtgatcctgcgagccatttccattttgtggatttgctggcaggtttcagaactctcctgctgtcactgtcagcatagcttctcatagtactaccaatgcttaatgtccttaatgagttcatccacggtgaggactctctttagggtcctgtatgtgccttccacattcccttcctgtgccatcatactcctggcaatgaacttcaggttttaaatccatgagcttggatctaagtctccactctgccaaacctgatgttccatacccatttgacctctgtaatccaaataatagattccattgtagggatggatatgccacattttgtttatccgttcatctgttgctggacatttggtttgtttccgccttttgggtattgtgaatagtgctgctgtaaacattcatgtacgggtttttgtttgttttgtttgagacagagtttcactctgtcacccaggcctgttgtgtagtggtgtaatggtagctcgctgtagcctcgacctctcaggctcaagtgatccttcagagtagctaggcctccggagtagctgggactacaggtgtgcaccaccatgcccagctaacttttaaattttttttgtagagatggaatctcactatgttgcccagactagtctcaaactcctgggctcaagcgatcctcccaccttggctcagagagtactgggcttacaggcatgagccactgtgcctggcccaagtttttgtttgaacacatgttttcagttcttttgggcatatattataactaggagtggaattgctgggttatatgctaattctatatttaactttttgaagagccaccacactgttttccaagcagctgaatcattttacattcccactagcaatatataaggattacagtgtcctcacatgcttgccaacacttgttattttgtttttttattttttatttttttgagacagagttttgctcttgtcacccaggctggagtgcaatggcacaatgttggctcattgcaaactccacctttcaggttcaagcgattctcctgcctcagcctcccaagtagctgggattacaggcacccataaccacacccggctaatttttgtatttttagtagagacaaggtttcatcatattggccaggctgacctcgaactcctgacctctggtgatctgttcgccttggcctcccaaagtgctgggattataggcgtgagccaccgcgcccagcccttgattttattttatttttttgccttccaagtgagcatgatgtggtacctcattgtggttttaatttgcgtttcatctgcttgttagccattcatagattaccttcagcaagatgtctactattttttaattgagtcattatgtgcattatttttaattcattcatttggtcattcatctgagcacctcttatgttcctggcactcagacacttgggataaagcagtgaacacattagttgccaacactggaaagtcaagagaattcttaaaaaataaaatttcttgctcctgacttctctactcagatctgggcctgagttctcaggagccagccctctgctggcacctttaaggtggggctgtgctttgtttcttcaaggctcctatctggtctcagtcccacctgggccctgagagccttgggttttacaacacccatgctaagtagctgatgcctttccaagtagttactttagttctgagttgagaacaactggcactgctgtttttcctctaactccttaagcttcccatgtcgcattgaaaaaaaaaattcctaaaaccaaatccctttaagaatagaagttggggcaccgtggctcatacctgtagtcccagctacttgggaggctaagatgggaagatctcttaagcctgagagcttgaggcttcagtgagcagtaattgtgccactgcactacagcctgggtgacatagtgagtctcaaaacaaaacgaaaaaatagaaaaagaagtgtcgggtcgaggggtggggccgggggagggagagcatcagggtaaatagctaatgcatgcagggcttaatacctaggtgacaggttgataggtgcagcaaaccaccatggcaaacgtttacctgtgtaacaaacctgcacgttctacacgtgtatcccagaacttaaaataaagttaaaaaaaagaaagaaagaaagaaaaagaagtggccaccctttatgccccaggcatttgtggtgtgggcaaggaaggagaattggtttgtttatgcttcctctttcgaaatgatgggtgggtcctatgtttatgagcacattgcattgatatgagtttgtagaactcttttaattccttggaagagccacctgtttccaactcaaccctgccctaccctggtcccagtttcttgggatcagttagtagaaattgtggaataataaaattgaggttatattatctctgatgatcagataggagataaattccaaaccagaaggaacaggaatcacctatgccctctcctttctcccagatctgagggtggggcatgggcaggcatggctgtaacgttgaggcagttgcaccgggtcctctgctcctggctcgggtgttcatccgccacgtgatccacttgatctctttgtacttcagcttctttacctgtggaatgggagttcatgatactcacctgcatttttttaaacatttttttaaaatttgggacggagtttcactctgtgggccaggctggagtgcagtgacacaatctcggctcactgcaacctctacctcttggattcaagcttctcctgccttggcttcctgagtagctgggattacaggcacacaccaccacacccagctaattttttgtatttttagtagagacggggttgcaccatgttggccaggctggtctcaaactcctgacctcagatgatccacccacctcagcctcccaaaatgttggggttacaggcgtgagccaccgcgctcggcctcacctgcatttttctaggattatattagtgtgtctcaaagaaacccaaactgagagtgactgaaagaagatgggggcaagggaatggttgtgtgtcttgactattatcaatatcaatatcctggctataatattgtactatagttttgcaagatgttaacattgggaaaatttgaatattgatgctgaagaatgcatgagctatttctgtattgtttcttttttgtagttttttgtggttgttgttttgggtttgtgtgtgtgtgtgtgtgctgttgttgttgttgttgttgttgtttctgagacaggctcttgctctgttgcccaggctggagtgcagtgggtgtaatcaaccttgaactactaggctcaagagatcttcctgcctcagcgtcccaagtagctaggagtacaggtgcatgctactatgcctagctaatttaaaaaaaaaaaaattgccagcctgggcaacatggcaaaaccccatctctacaaaacatacaaaaaaatagccaaccatggggtcatacacttgtagtcccagctacacaggaggctgaggtgggagaatcacatgagcccgggaggtccaggctgcagtcagtgagccatgactacaccactgcactcaagcctgagcgacagagtaagaccgtcccaaatttttttttttttttttttttttttagagacagggtcttgctctgtcacccaggctggtctcaaactcctgggcttgagcaattcccctgccttggccttccaaagtgctgggattacaggcatgagccaccgtacctggcctgaatatcatttcttacatctgcatatcaatctacaaatatcccaaaataaataatttaattttcaaaagcaaaaaaaagaaaaaagaaaggagatgggagtttctttatctgggagacagccagtctgtgactggtgtggtagctcctgctgtccaggcgtcaggctcctctcttgttgctctgtggtgccccaaatcactatgtggtccaaaatgctaccattcttttcccgtcacaagcagcattccagcctgaggaagaaaaaaaagagaagatgtcccttcctctgaaagtttcttctctgaagttgcacacactatctctctttaaaccccactggccaggacctcaccatctggccagatcggctgccggggaagcttggaaacctggtctttattccacacaacgtggccagctagatgtctgagggtgtgtcatgagagaagaaggacctattggggtttctgtcacaccacctgtcagagccgctgtgaagacacaggagaaaacacatatgccaattgaactggatttttttttttcccccataaatcagcctgccgatttcccaattagaatttccaggagaccactgtttggtctgaaaaccatggtgaataatggaaaaccaagttccaaactaaatgggactcctggtcattgtgagaataggaggatgcttgttgtgaggctgaacacctgccgtccggctggagtgtgcagtggcaccatcttggctcactgcaacctccgcctcccggattcaagagattttcctgcctcagcctcccgggtagctgggactacaggcgtgcaccaccacgcctgttttatttttgtatttttagtagagatggggtttcaccatgttggcctggctggtctcaaactcctgacctcaggtgatccacccacctcggcctcccaaagtgctgggattacaggtgtgattcatcattcctggccagttcccagactttataggtggggaaggtgagctttagaaaggagaaatcctgtgtcttaatttgaattctcctgagaacaaggacttgggtgcaggtagtttattttggagagtgatcctaggaagtggggataggaagtagagagagtaaacagggagtggggaagctgatgaggggatgttattaacatcatcaccctaggcaacaagagcttcattcacctggacctctgagaaggtacagatacctcccagaaaaggggagacttggagctccagccccatggggttgactgctgtccctggaggcatgagctcctcttccaggctgggctggcctgcagaaccagggactcccacattgaggaagttcctgagcaggcagcagactcccaaggagccaccccagcagctgtagctaaaaccaagggtgggcggaggagctgtgacataagacacccatcacccacccagccagcagcacacctgcattgagacctcgggtcctcgagtccctggcctggtgcattctccccgtgtcccccgagcttcagagcatcagcagtgttcctccttcactgtgacgcttgtcctcacttcccaggtgaggagtctaagaaaacagcctttccatcagcccctgtcgtgacagaccctccagtgggatggtagtggctgcctcacccatttacagggcaacccagttttgctccttctgccttgaaatttgttcctcccagaaactgtccctcacaaggcatgaacaatcaatagaagatatacgtggtcttcccagcactacagctgcagaatgagctgtggagtgccccgtccggagtcctgaacagcttcaaacttttcccctttagaaatgcctgacacgccccaaccccagtaatcatcgtgcatttaacttaggggttgcctcacccttgggagatccaaacccccaggctgacttcctgtccttcatggaggagaaggctcttgtctgcagtgtactcctcagtttctactcagggccagtgacctggagccttggcacagaaaccctgaagagagaagctgaggtaaatccactgctttggccaagcagacaggtgacctgcaagagatgggaacagcctcatccttaacactgcaccctctgataaaaaggtacctggtggccgggcgcggtggctcacacctgtaatcctagcactttgggaggccgaggcgggcggatcacctgaggtcgggagtttgagaccagcctgaccaacatggagaaactctgtctctactaaacatgcaaaattagccgggcgtggtggcgcatgcctgtaatcccaggtactcgggaggctgaggcaggagaatcgtttgaacccaggaggcggaggttgtggtgagccgagatcacgccattgcactccagcctgacaacgagagcgaaactctgtcttaaaaaaataatgataaaaataaaataaaataaaaaaggtgcctggtggccaggtgcggtggctcacacctgtaatcccaggactttgggatgccaaggtgggagaatcacttgagcccaggagttcgagaccagttctggcaacatagtaagactccatctctaccaaaaaataaaaataaaaattagctgggtgtggtggcacacacctgtagtcccagctacttgggaggctgagatgggaggattgcttgagtttgggaggtcgaggcttcagtgagccatggtggcaccactgcactctagcccagttgacagagtgagatcctttctcaaagacaaacagacaaacaataaaaaaaaaaatgaaaaaaagacctctgggaagtccaggtgtcacaccctattcctaggactgcgtgtcctcactggcctgctctaggtgacagtttctgagctcttactcagacctaggtgggaatgtgaacagagcaaattctgttcccataggagaagatgtgctctggcttccagaccttccaggccatcattggatatgggctaggcagtccctggtggaatccaggtagaagctcccagggccccctaggctgaggaccacaccattggtggccatctctggccaggagggtgtggaggtttggagggacatgcagcatcttccttcatcactagtgggatgggaagaggaccagttttccactctagaccttggcagatctcagtagaccctgagggcccacagatttcatagacatatggaattgaatgaaattacaagggggagaagcaggaggagctgaggttggtagttgagatgtgaggagtgtggggaaagaaaccccacttctgtcccatgtacccctaggagagagtaggttatcttcttttggttctcttctttaccgaatagccttaatccgagagttgaaatgatttgtttacatacatttctcttcctaccacactatggctacttagagggctgggagcagtgtcttatccatccctgtatccctagtacctggcacagggctggcacatagtaggtgctcactaaagcttgcttgaatagatgagtcaaaggcggttggggtggcttagatggccaagagagtggttgtcaaagtgtgattcatagaatcctcacccagtcccacatcagaatcacatgggattctgttaaaaattcagattctcccggtccactccccagaagctctgcaatgagtaggcattgcaggggcccaggaatttgcattctttgtgagatcctgagatgattccgaagcagctctccatggaccacatcttgaaaaactgtcacttggaggagggagtgacactggttgagaaggttccttctgatgtccctggagggacaagggagggatcagcccataaacacagatcctggttccaacatccatccatccctcttcacttcataaatgatgtgggtccacttgggcccatgggtggagaaaaccccaaccccagaacctggagtttgggggctctcctcattcttccaggcccaatgtcctctgctctggaccctttggtttcagctgggttcaagttccagtcaccctcccgttctcacagcactccctttcattttccatgccccagccacagagacaagctctcctctgctggaaaagccctcctctcccttctctgatgattaatacttcctcacccttcagctgtcagcttaggcataaatttcttaagggagttttccttggagccccaggtgatcccagattccgtcttacaggtgctcctaggaccacggccccttccttatctcagctttctaaacatacattcatcattaccaaggttgactgcactcctgtctttcccaccagacccttatctctgcaaggacagggactgtatttggctttgttcattttttaccattgggccctctctgtggtgggtgtttcctaaatatttgttggaggaataaatgttggctaagtactccgtagggctgaggaggccatagtatgggtggccccagggcccaggtctaagagaggctgccttaacccagctttgaggggacagacaatgggcctcagatgggctgggattccccccacagtctgcctcatggctcccatttcctgattttctaggctgttcccacccacgaagagctaatatgtctaatttccccagagacagggagcttcttagaagaaggactgtggcttgttctatctctagtcctagcatagtacttggcacatacgggtgctcactgaatgtgtgtcgaaagcatggtcgataaatgccatgaatggatggtaaaatgcctgtcgactacagagcacttcaccattcgcaaagcacctttgcaggcctgttcacgcttgaacgtcatggccctgctatggaataggcaaggcagtctcttcatccccttcgagccaaagagtaaacagataacttgccaggtcccactgggttttattggtttgttgtttgagacagggcctctctctgtcacccaggctcaagtgcagtggtgcaaccatgactcactgcaacctctgcctcccaggctcgagtgatcctcccccttcaacctccggagtagctgggactacaggcatgcgccaccatacctggttaattgtttaaaatgtttcatagagacagggtttccctatattgcccaggctgatctcgaactcctgggctcaagcgatcctcctgctgcagcctcccaaagtgctggcaagactttacaggtgtgagccaccatgcctggctcaggtgccacagttaataaaaggtggggaaagttaagtggagcagtaatggaagtgcaggttctcctccagcttgacgtgcccttacttaggggttgtctcttacctggcagggctgggaggagatgggtagttcctgaaaggccgatggagaaaactggggagtaggttactactcccgtgactgcccaggcctctacccagacctgtttccacctgtgcactgaaatggataggtagccacatgtgagaggtgaagagtcccggccccagactagaacccgagccaggtcccgagctggctgcttcctccactcaacatccccagctcagtactctcaggctcttggtgccccttgcttatctgacatctggcccctttgccttaactggctgctttcagccagcttcttaattccctggagacagaaactgcctgcctgccttgtgacatcatctgagagtgggagctggagcccaggtgccatttggcatataggggctttcttcttcatctgcaggtgcccaggatctttagcacctggcactgaacacctacaggcctgtggaataacaggggccgcccagctgcctctcttagggcctccatctgccctctcctttatccctttcctattctgtctttggctttcaggccctcaggagaaaaactggcccaccaaggagtctaaaatcctaagaccttggattcaagcccagggtccaggcacgcttccctggttcctcaggaaggaccccagtgacctgtttattctccaggaggcaggggctaggggtgaaggcatggtcctgctttgtaagatctgtctgtctgcacaggcaggctctcccaggcttcactatggcatctcacctttcccgggaaggcgaaggagggccctttgctccagcttggtgtaaccttgtccctgtcctgctgccttgggattaggcttgaggttgggaaaagggtctgggggattttaggcttacaagaagatctggaggaaacctagtggtctctaacacattgtcagcagcctaccccctggcttggctgggtgtgccatgcccttggttccagggagactgatctgggacagtcaaacccatagctcctctccctacagttccagagaggtggatcgcatggtctccacgcccatcggaggcctcagctacgttcaggggtgcaccaaaaagcatcttaacagcaagactgtgggccagtgcctggagaccacagcacagagggtcccagaacgagaggccttggtcgtcctccatgaagacgtcaggttgacctttgcccaactcaaggaggaggtgggtcctgacctggaaacctcaaagtgggcaagtactagctcccaagctgccctagctgggcagaaccaggagcgtgggcacctggctatggggcaatgtgctagggctgccagagaaccccgagggatggcaggagaaggagacaggactgacgcacaaggggtccaatgcctcctgtatcagcagctcctggggcacctgttaactatgcaggccccagggcagacccactgaggctgggaatctgcctgtccctttgtccccagtgactgtgatgagaactccgggctaagggctgagggtgggagtcttgggccccttcctgcttgccccctttcaccccttgcgccccatcttttacactaggtggacaaagctgcttctggcctcctgagcattggcctctgcaaaggtgaccggctgggcatgtggggacctaactcctatgcatgggtgctcatgcagttggccaccgcccaggcgggcatcattctggtgaggaggggcttgcttggcacagcttggtgtgcatgggggaacatcactgaaggggagcccctcaggccctcagccccaggatcaaaccagtgccttgttggtttcaaaccaggtagtgctttctcctgaggcccaccaaggaggtctctgggagttagggggctgtagagtgctgcctctatgcctcctgggggcggaggggcagcaggagggacagggtctgcccagaatactgatatgccctcgccgcttccaccaggtgtctgtgaacccagcctaccaggctatggaactggagtatgtcctcaagaaggtacagctcatttgtcggggaggggcccggctggggcctggcacagggggctgcacagactctgcttgtcagagtctgacggtgtgagctagggcatgcataggcgggtgatacgcagagtgtccttccttaggccatgtgtgattggaaggtggccccaactccaaggagagcgtggttggtcagacacaaacctggcgtgagtgtgcagggacgggggcatgtgtgtgtcagggcagaggtgtgtgtgtgtgtgtgtgtgtgtgcgtgtgtccatcctcatatgtgatgcatatgtgtctcagggtgtggtgtgtgtgtctcggggctggtacatgtgtgcatttgtcttggagtgtggtgcctgtgagtgtgctggaggtgtgtgtgtcagaagcgggtgcatctgtatgagagcagctgattagtgaggactcccccagagctctagtctggggctccccgctgactggaggtgggggactccccttccacaggtgggctgcaaggcccttgtgttccccaagcaattcaagacccagcaatactacaacgtcctgaagcagatctgtccagaagtggagaatgcccagccaggggccttgaagagtcagaggtgggtgtgtcccaggttagtgggtggtgcatcattcagcatccctgattccttcacttcctacccaccctgccccctccctcagcccctgtctctcaccatcgtccccaaccccaggctcccagatctgaccacagtcatctcggtggatgcccctttgccggggaccctgctcctggatgaagtggtggcggctggcagcacacggcagcatctggaccagctccaatacaaccagcagttcctgtcctgccatgaccccatcaacatccagttcacctcggtagggcagaggtctccaggccccaagcccagatggacacatgccccctgtccctgtgacacttccgcggggatggggagacagcagaggagagcatgccttctttactgagactggccttcagctgtcctctctgccctggaaaatatcagcacctggtgtccttgtcacatttcctcccctagccccccgccctctccactccagccctcttgttcccggtgcagtggcagattcactgaaccaacacaggttggaactgctacaggctgcccctcatttagctgatgaggaatcagagacgcagaagagagaatttgcccaagccagcttgtgggtggcagagttctctgggccatgtaagtggcatgagaacggagaccttatcttctgcattgctggaccctgacacctggtatcgtggtagaccttttgcaaatatactgaacagatggatctggggcaacaatccctgtctcctgattcccggtcccgtgctcttcaaggcagtggcccagggtgggaaggagatgagaaggaggccaagccatgccctgtttgccttgtcaggggacaacaggcagccccaagggggccaccctctcccactacaacattgtcaacaactccaacattttaggagagcgcctgaaactgcatgagaaggtgaggcggcactaggcccagggcaaggctgcaggaggggtggctcaggcaggggtggggggctggctgggctccccttgccagctagagaggaactggcgtctggctccaagacagacccagcctcctgtctccatcaccagacaccagagcagttgcggatgatcctgcccaaccccctgtaccattgcctgggttccgtggcaggcacaatgatgtgtctgatgtacggtgccaccctcatcctggcctctcccatcttcaatggcaagaaggcactggaggccatcagcagagagaggtgggcactggtggacaggctacttgtgggctgataaaaccctcttcttcctcactcctgggccctgacacctttccaagctgcctcctccctccagccaggagactgaggatggggacagtggaggacccccaggagaggaccagttcctgcctcaggagcttctcctgcctattccctttgctgcagtttcatggcggggtgggtgagaacagggagttcccttccacttccaagcctaatttcgagacctcctcctatacagaggcaccttcctgtatggtacccccacgatgttcgtggacattctgaaccagccagacttctccagttatgacatctcgaccatgtgtggaggtggggtggggccaagggcagccaggcttggggagggggctgcttcccccacaggaatggcccgggtgagttagctatgctcccagtcttttatatagggggcaagaaggacgctgtaaaaatgtgggtgggagggagggagatccccagtgtccctggacaccagcccagggccagctgccaggtgtaggaaaggctcggggtcagaggagaaaagggaatgttcctcccctgaatgagctgtaggtgaaaggactccactgggcctggagaattggggagctgtgtcagccctctctctgattcaggtgtcattgctgggtcccctgcacctccagagttgatccgagccatcatcaacaagataaatatgaaggacctggtggtgagtggtgactgcggcccgggctgtgggcaggccaggcctgggatgacagcagatggacagacatggggatgagtccaggccagatgttcaaaggagaccctctcagccagccctccttccagaaagcagatgtgagaaaagatagtctgacctcatcagcacctggtgggtgaaggagataggtggcaggggagtaaatataatacatacatacatttatatttatagaaatctcaggaagaaattgcagcatgggaagatggacagcaaagcaccgatgtcctgctagaacgtcctggcaggtgggggctggcagagttggggcatgggctttaaaaccctttctggaagcaaggggtggggcaaggatctgatgattgtttccacgtggcagggaaagaggaacagaggaaggatgatcctgggagggtggccatcctgatgaccaacctgttgtggttctgattgacttggggggggggtctcagcaacagcttctccaagaggagctggagggtggggaaggcatgaaggctggggagaggctcagccttccttctccccaggacactgctgggtggagctgggttggtagtggagtgcccgaggccccctgccaggacgtgtctaggtgtaggcagctctgtgcatcagcagaggctgtggggagaaggtatgggtggaggtgagaaggtcagtagtctctccggtggaaggcagaggccagtcaccaggactggctgggtcagaacctgcaaagaggcaaagatcgatgtcagtactccaacaacacagatgatgcttgaagaaaatggtggaagtcctgggcaggaccttttcctcccttcaacaggggacccagtcgtcccctcctctctctgtaaaaatggagggtctgcctgaccctccagggccagggggtatcctggaagataccagctcacttgctggaatcaccaaagagggacataggggacctgtttacctggcccccacctgtttaatggcggccagctttcttggacctcttggtggggaacttgcagctgcggaaggcgtccgtgtcacggatgtgctggcccttgaacttggcaggtgaggcacaggtggcatctgggcgggaggccttggcttccagccacctggagagacagaaacttgctggggctggggaagaaggtgggagtgctggggggaagggcagtgaactatggggccaggattgacttggccacaggatagtctgaagctgtcatcttcattttacaaatggggaaactgaggctcccagggtcccatgcttattaggtagcagatctaggatgcatgtccaacatgtcttagtgcagggctaatgtgcctctatcacatgagggtgggctctgggagtgacatggaagtgttcttaccgccgaaggccccggagctggcaggtacacttccaggggttattggtaagggcgagggtctccaggctgtcgaaggggaagttggagggtagctggttcaagcggttgttctccaaatggacgtgtttcagcgtggttacacccaggaaggcaccatctgagaactggggagcaaggtgggagcaaggtgggagcaaggtggtcatgagtgaatgagtaagcacccgagtgccagaggggcaggatccttccctgaacctgagccatagcactttgaggagtttcccagttttcaaagcagtatgaccaagtgatctcagataatccaatctacacaaccccctttgagacagatggtgttattttcttttttttttttttttcctttttttttttttgagatggagtctcactgtgttgcccaggctggagcacagtggcacgatctcagctcactgcaagctccgcctcccgggttcacgccattctccggcctcagcctcctgagtagctgggactacaagtgcccgccaccatgcccggctaatttttttgtatttttttagtagagacgcagtttcaccatgttagccaggatggtctcgatctcctgacctcgtgatctacccgcctcagcctcccaaagtgctgggattacaggcgtgagccaccacgcccagccaggtggtgttattttcaatatgcaaatggggaaacggaaaaagcgcagtcctttgccctgggtcacagcagtgggtaaacagtagccacaggaccacacccagctcctcttcccctggcaccacaatccctgcacaaacactgggactgtggggctgccagagtttggccccagcaatccaaactggtacacggtgaacttggtctgtgcttggtggagtgggcagtgggcccaggctccccacagtcccagggtcccaggacttccctcagctctgtcctcactgctcccccactgccagccagacgctatttgtgaagccaccttggtggagcctttggccaggttggacggctccagaggaaatgttctattggtgcccacacctttgcccaggcgccacaattcctgtctggcctcccctgccccaaaccagcccctaattcgctgctctgctgcccactgaaagaccactctggcactggtgggccacaggggactccaacttcagctggggagaggcagggctgaagaagggcaggcttgagcaggctccttccacccagacaaaggttggctgctgcccaagtgagattctgcccacatctccacacccgcaccctttcctgtggcccacattgaggtatgaaggtctccagtaaccagactctcctctaccttgttggttccccacccaaacctcctggctgaagcccctgtaccagggtgatttttccagtcccagagaagggattctgctctgatccaaggtagccccacctggccagacactgggcaccccaggggagaaaggaatgagtgaggatgcagacaggagatgggtctagtgacggaggagggcaaagggcagttagcagtctggagacagtgagtcacgccagtcttctctgtggagagacacctggggtcttgggccaaggattgacaatagtggtcttgcctttgccccttcacggagcccatgggcacgatgcttgcatcctgggggagcccttggtcccacgcctactgagctgcaatggacttgagaatgcagtgaattgtgtctgtgtggattgggcagggccatccaccagggcctctatggggcatggagaatgtcttcctcaggcatttgcttcccctcactccccagtcccccactcccccttagcacacatgcacagcccccaccaggaacagggtctctttgtgggcctgatctgcccagctcctctggaaggctcctcaataaacaaaccttcctttatggggtggtaggtttactggagacgggaaaaacagcagaggaggggtggaaggcccaacaggaagaggtggctgctgctcacagttgggggtttggaagcactggagatggccctagggggccttttgtggggccagggcagtcccactccttttatatgtaagaatcctaggagggcagtggtcgagactggcagcagacagggattagggtagggatgtgacaaggcgaggaagggaggtggcagagctgctcaccttggagatagccagagggacagggaacctggggacgggggatggtgccagctgtggccctggctcctggggcctccaggaagggaagaaggaaccagggcagagcccacagccaggagctcaccttctccaggttggtgttgtccagccagagggtctccaggtatctgccaaaggactggaaggcattgtccgggatgcttttcagggggttgtgggacagcttcagctcctccaccacccgtagcttgctcagggcagctgaggggtagctggacagctggttcctgtccacgtggaatttggcgaggttctccacgtcgtccagggccccgggctgcagggagctcaacgcgttttccgacaggtagagccagcgcaggtccttggctccctggaaggcgcctgcgcgcagctcacggatcttgttgttgttgagctgcaagatgaagaggttgaccagcggggagagcaacccccggggcagctcagtgaccttgttgtggtccaggtagaggtaggtcagctcggtcaggtcgtcgaaggcacctgcgcgcagcacgcggatgtcgttatgggacaggtacaagtagataagttgcttgaggccgcggaaggcaccggcggccacctcgcggatctggcagtgctgcaggtgcaatgacacgaggttcggcatggcccggaacgaattggcagccagcaccgggaagttgttgcgctgtaggttgagcagcttggtcttctctgacaccttggggatcttctgcagccccaccttgtcgcagatgacgtgctgcaggtcgctgtggcagtggcagttctgggggcaggcggccagcgccggcagcagaccagccaggaggccgaggctgagcaagagcattgggcggaccatggctgggacgcctggggccggggctgggggcagcagcggcggcggggcgcgggcagcggcgagtcctaggcgctcgggtctgccgccctctttatacggtggccctgaccgcagccggcagccgagccagctcctacgtggagcatcgaggccactgggcttaactcgctcgcgcccagagatgcgcccccgccctccacggggaagggggcggggccgttcccccagccggctaccgtgcatgagggggtgggaccgtggcccccgagccccgagccctgagccccggctgtagccccccgctctcctatggtgctcctctgcctaccgcctttcccggggcttttctgggaagggggaatagttatgtctggagccccgagtttacatcggagagagggaggcgttccctcaacttatttgtttgctcaggtttgagcctccacgccgcgccatccacacacgctcggccgggtgccctggatgcgaggcgggaggaagcggggccggacagctggatgcgtctccctgcggtgggccagctgcctgcgctttaaaggggcgcttgtgcggcgcctgccgagcgtgagagccgccccggcgtcggtctcccacttcagactcgacgcgccgaagctggccctgggtagacccgagctccttccccaccctcgggcgcgcccccacccctctcttccaaccccgcttgcgtttctgtcgccggcgccctcatcccctttttccaccgctgaaggctaagcagagaagtgggaagtgggggagagtggcccacaggaatggcaaacacacctggaaaccacaggccacaagcacagtcgcaccatcccccctccttcatcgccccgaaatatctccatccctcatccccaaccctagtggtcaggacccgcccctgaggggtctcagggtggcggctgagtggcgccgaggtgtacttggcagatgccacattcgggcggtggccccaggactgtgaggaggggtgcgggagggggtggggcaggtcgagggaccagccctggacggctctggctgccagaccctaagttctgtgggcagtcccgccccagcccgccagatttctgtgtgcccacttgccagccacgatgtccggattcctgtggaaaggggagggtgagcaggcagggtcacagctctggcctcagggtgagctccaagctgcctggcacaggatattgtctgtgatgaggggtggaaggagaaaccagaacccacattgaaccaaaccccagccgtgccagagccagagcagctgatatgggggaagcttggtgcagggaggaggatggatgagatctggtatccgttgattaaaggggacctaggatacggggtaactagcctctcttcccttacccagtaccctcgtgttggggcctggtttccagggcctgcccttttcccaaacctctctgccccttgcctctaggataggagggtcatacttggcctagaccattccttgatggtatttaggcttctccaaggctggcttctggtttttctgttgctcaggctttccaaccactggaaatgggggaggtggggtgggggtaccactggtttttaaaatcactgcttaggttgtttttttattttgatggaaataaattcacgggaaactctccagagcttgggggacgcctgccccaaggccaggcacttgttcagggtttgcagaatgcgggggtggggttgtgtctgtgccactcctagctgggccaaggcaggctggctttctcatcaagtttatggggccttcagcttggaagggaggagccggggatgtggcctgaaatcaggaaggtggggttaaggcagccaggggatggggggagaagtgtggggtgttggtaataccggagccacaggcacagacaggtggctgctccagggaaacggggcactgagagagctccagctggaagagaatggtgtccctgctctcaattttctttcagatctggggccctgcagagatctagtctgctcactcccagcacctctgcctcctgaccccaggcccctaccaatgatgtctctgtttccaccattcggctgccctccactttcccttttcttttatgaattccttcccatttcctcagatagctcacctgatccctctgcacgtgctgagccctcttcaaacaccctttctggaccctctaggttgcttatggaaccacagagaacagtcccgtgacattcgcgcacttccctgaggacactgtggagcagaaggcagaaagcgtgggcagaattatgcctcacacggaggtgagcccctgaccaagactccaaagtcccacctcccgtcacccagctggggtgcacccagctgggacatcggttgctttcagtgagagagtcaaatggctcactcaggatgcctagagccccccagcagcaggggtgtgctaggcctggcccggagtgttctctgtgggctaagcatgaaaggggaagagctggaacagtggctgtgagcggctgccagctgaacttctccgcggcctcccttcctgtctgaggtgtgtttttgccaagcccactgtctgtttcagggcagccagggtagcctcaaagaggagccagagcacagagagttttcctacacagcttcttttcctccagtggtgctcgcctctcgctttagcagagttcttcttcttgcttggcgtaaacacttcatttcccaagcagcctatccctttggggcggtccctttgcccctcaaaggttgccccagagtgcacctgaatctcaaatgcccagccatgcctcctttcctgctccaacactggggctgtgccagctggctcctgatttcccctgcacccttctgctcccgcccctgggggatcgctgcccccgtgcacaagcagctgcttcccctggggctgaccgctgtcctggcgtgaatctgccctgccctcccgccagagcaaccatgtacccagggattgagtagggatgtgagcctcctcccgtgtgtgctacagctgcactgccactgtcactaagatgcccacctggaagggaaacaggggcaggcatcactcaccccatttcacggacacagacactgaggcacacagaggctcagctttccttggcacggtggccgtggctcttttctctaccaggctttcagactctgtctctcctgttcacatggtgttgccatgccaccctgtttggcttatttgctgcttaatgggaagtaagaggagactcccttctcctctgcacggtttataattcttcagctggctctgcagtccacaaacctctttctttgcagcagctgcctgcccactctgtttcctcagccctcccagcctgggactcagctcttctttcatgcccagctcaggtctctcactggctttgggtcgactctagcctttgtctcccttctctggatggggataagcagagccagggggcctcattccaggcagttgggttggggggttgggggcaggcaaagctctctccatttccaaggaccacctatcctgaagcaagaggataggaagccccaacctgaggccatcctgtcccaggcccggatcatgaacatggaggcagggacgctggcaaagctgaacacgcccggggagctgtgcatccgagggtactgcgtcatgctgggctactggggtgagcctcagaagacagaggaagcagtggatcaggacaagtggtattggacagggtgagaaggcagggcggggtggaggctctggccgctgaggggaggctggaggtcttgaggctgagccgggaacattaacctggcaccgtgaggatgtgggtatcaagatgacccctcacatgctggagtcttaatttccaaaatgtatacggtggggatgatcatacatagcacagaagaaagcaactgggtcatcaccctacaccagcagctgcaaaatctgagtccagattcagtcactcatttgttagctcagcaaattcttactagaattccttatgtgctagcaccgttctcgccgctagaggtccagaggaaagtaagatgagaaggatcctgctttttggaggaagacagatgatgcccaacatcgataaataacaccaagaaaataggccaggcgcggtgactcacacctgtaatctcagcagtttgggaggccgaggcgggtggatcacctgaagtcagaagtttgagaccagcctggccaacacagtgaaaccccacctctactaaaaatacaaaaattagccggacgtggtggcggcacgtgcctgtagtcccagctactcggaggctgaggcaggagaatcgctgtaacccaggagatggaggttgcagtgaaccgagatcgcgccactgcactcaagactgggcgacagagcaggactccatctcaaaaacaaacaagcaaatgaacaaacaaaaaacactaagaaaatgaaatagggttataggagagaaagtggctgtggtggggaggggagcttcccttagattgagtggacagagaagatgtctggagacatttgagctgagacctggaaagaagccagtcgtgaaaagctatgtatagatgtgttgagagagacagaatatgttataggtattgttttgtttttgtctacctcccctccccttactggactattaattccagagactgtgtcttgttcctgctatgtctcccagagtctagagcagtggaagacacatagtagctggtcaataaatgtttcacgactgagcaagcaagtgagtgaacaaggcagagatgacaggttgcccctgggctttccttacagagatgtcgccacaatgaatgagcagggcttctgcaagatcgtgggccgctctaaggatatgatcatccggggtggtgagaacatctaccccgcagagctcgaggacttctttcacacacacccgaaggtgcaggaagtgcaggtgaggcacttggctcaggtgagcccccagaaacaagaaacacacatgaacacggtgatgtctgatatttttctttggccctggaaggtggtgggagtgaaggacgatcggatgggggaagagatttgtgcctgcattcggctgaaggacggggaggagaccacggtggaggagataaaagctttctgcaaagggaaggtgggagcctccgctcaacctagctgatgctgctctgttctttgctcacccactcctctgccaaccagcccagggtggggattgctctgcccttgacgaagctgactcctggccaggccagcccctggtcccctacccatacccctgtgagcttgcgcagcctcacgccttacctccctccctctggtctgcagatctctcacttcaagattccgaagtacatcgtgtttgtcacaaactaccccctcaccatttcaggaaaggtgtgtaaggtggaggaggctggggagggcagcctgggctctggggccccatagggccccacctctgtttccttcagcaatgggtgtggagagactggcagtagggtgaccgggtcacctaatcctggtttgcctggggactttccctgttttggcactaagagcctgagaaaccccttattcttgggtgaaccaagacagctggtaaccctaactccattttctttcctctagatccagaaattcaaacttcgagagcagatggaacgacatctaaatctgtgaataaagcagcaggcctgtcctggccggttggcttgactctctcctgtcagaatgcaacctggctttatgcacctagatgtccccagcacccagttctgagccaggcacatcaaatgtcaaggaattgactgaacgaactaagagctcctggatgggtccgggaactcgcctgggcacaaggtgccaaaaggcaggcagcctgcccaggccctccctcctgtccatcccccacattcccctgtctgtccttgtgatttggcataaagagcttctgttttctttggcttcttgctggtgggctctcttggcagctactacaggatggagaagggaagacactgaggggaactagcactttcagacgtcctattccttgtcattgagagtgcagagcaccttgatgtggattatctacttaatttaaccctcacccttggtatccctttgagataccaacccatttttgttgttgttcttgttttttgagacagagtcttgccctgtcacccaggctggagtgtagtcatgcgatctcagctcactgcaacctctgcctccctaattcaagtgattctccttcctcaccctcccaagtaactgggattgcagatacccaccaccacacccaactaacttttgtatttttagtagaggcgaggttttaccatgttggccaggctggtcctcaaactcctgacctcaagcaatccgcctgcctcagcctaccaaagtgctgggattacaggcatgaaccactgcgcctggccccaattttttatttttaagctactctaatttaattctttttcacattgttgccagattagtctagcaagaagtattctttttatatatgtataacagcttgattgagatgtaattcacatactctccagttcactcccacctcccccattttctagagacaggatctcattccgtcacccgtgctggagtgcagtgactcactgtagcgacatgatcatagctcactgcagcctcgaactcctgggctcaagcagtcctcccacctcagcctcctgagtagctgggactgtaggaatgtgccaccatgtcttaactaatttttaaacatagacacaggatcttgctatgttgcctaggctggtctagaactcatgggctcaagcaatcctcctgcctcagtctctcaaagtgctgggacaatctaccatttaaagtatagaattcagtggtctttagtatattcacaaatatgtgtaactatcaccacagtcaattttaaatattgtcatcacctaagaaagaaaccccatactctttaactattatctcccatctcccagcccccttcctccccaaccaacctcatttttagtttttatttgttttgattggtgaacctggggcatccctcgtaggcagggccagataaagcaggttgtaccttgacccaagaaataaaaacagctgggttccaaaaggcacatagattcccagttcacaggaatggaaacttgcctcctgcctgcccccttacctcccagcgcgcctgcccccttacctcccagcgcgcctgcccccttacctcccagcgcgcctgcccccttacctcgcagcgcgcctgcccccttacctcgcagcgctcctgcccccttacctcccagcgcgcctgcccccttacctcgcagcgcgcctgcccccttacctcgcagcgcgcctgcccccttacctcccagcgcgcctgcccccttacctcgcagcgcgcctgcccccttacctcccagcgcgcctgcccccttacctcgcagcgcgcctgcccccttacctcgcagcgtgcctgcccccttacctcccagcgtgcctgcccaaggcagcagcagcctcctcttgactttttaagaaatgaacataggtttaaggtattttcagtaccaggctctgtgctaggtactttcacattattttctctccaaatcttcccaacaatcctttcaagtagccattggtcccacttcaccaatgacccaacagaaactcagggaggttccgtatcttgctcaaggtcacacagctggatcagaacccagctgtctgttaggcaggttcactgcacactagttaccaacttgtcagagtccagtgaggcaaacacccacaagttacataacgctgagtccagcgaggcaaacacaagtgacatgcaacgtgtttattacctataggtaggcactaagggacaacagaaggctgggattcatttggagctggacccctacggctcaggaaagctgctgaggcagctgggggatggaccgttgtctgtgcatgcctgacttttttttttgttgttggtttgttgtgagatggagtctcgctctttcacccgggctggagtgcagtggtgtgaaccctgggattcaagcaattttcctgcctcagcctccctggtagctgggattacaggcgtgcactaccacgtccagctattttttttttttttagtagaaacagtttcgccatgttggccaggctggtcttgaacttctgacctcaggtgatccacccgcctcggcctcccaaagtgttgtgataacaggcatgggccaccacgcccagccagccagacttgtactgaagctgagggaccccagaaaccagcccgccctgtttttcgtttgtttgtttgtttgtttgatacagagtctcactctgtctcccaggctggagtgcagtgtcgccatctgggctcactgcaacttccgcctcccaggttcaagcaattctcctgcctcagcctcccgggtagctgggactactggcacgcaccaccacacctggctagttttttgtatttttagtaaaaacggggtttcaccgtgttagccaggatggtctcaatctcctgaccttatgatccgcccgcatcggcctcccaaagtgctgggattacaggagtaagccaccgcgcccggcttctgccctgggctttataccctggggccatgtgacatgttgggctgaagtgttgaaggacatgctttttctagggggactggaacagagcatggctgtgctggccagtccttccttccctcaggatgttgcattctctgcacactctacagttttatttatttatttattgagacagtcttgctccatcacccaggctggagtgcagtggcactgtctcagctcactgcaacctccgcctcccaggttcgagggattctccctgctcagcctcccgtgtagctgggattacaggtgcccaccaccacgcttggataatttttgtatttttggtaaagacggggtttcagcatgttggctaggctggtcttgaacttctgatctcaagtgatctgcccgcctcggcctcccaaagtgctgggattacaggcgtctacagttattcttgagaactacaagcaagaaaggaggggagaaccaggtcagttcaaggccactgggagaactgtcctgcaccgcctgcctctgaagcccatgatgtttctgctttgtgggacagttgttcaggtgcctgcttccccaggccttcccctgcgccttccccctctctcctacacacaccatctgactgtccttccagcacgtacacctccagatgcttgggttggcctgacccaaaacagtctactctcccggccaagccaattgcccctgggattttctgctcctccaagatcccgtgcatagccctggtggtggctcatgcccttaatccttagttactctagatgctgaggcaggaggatcgcttgaggccgaggagttcaagacctcccctctcccaaatatttgtaaatgaaattaaaagaaagatccagcccaagtgtctcttctgccctactgactcccacactcttaaaacagatgacctcacagcactgaggcggacggctctggtgtccagcaggcacggaattaatacgccttgcctgtcctggccggttggcttgcctctctcctgccagaatgcaacctggctttatgcacctagatgtccccagcgcccagttctgagccaggcacatcaaatgtcaaggaattgactgaacaaactaagagctcctggatgggtccgggaactcgcccgggcacaaggtgccaaaaggcaagcagcccgcctcgcggcctggggaaagaaccgacaggaggccgcagtgagcgcccgggcgcccggcaggtggcgccgcagccccgggcccgggccctcttgtcgcgcggtcacgcagcccctcttccttccgccggctgcgcactcacagtgatccctgcgcgcgtctcctgctcgggtcagtgcgccgcgctgcgctgggcgccatggcgctccccggagcccgggctcgcggctgggcggcagcagccagagcggcccagaggcgccgccgcgtggagaacgcaggagggtccccgagtcctgagcctgcgggccggcgcgcggcgctttacgtacacgtgagtaggggcgggggcggagcccacggtgtgtggccgcagccctggccgtgaccgtggccgtccaaaacccaggtggcggtttgtcactctatgaacccgcctgccgtgtttccgtgcccccgtacgaggtctgggatgggaccctgtgctttggcagggaaatgacttggtccagaaacctgaagtctctgctactcaccggctcggtgactctgaccaaatggttcaaatttcataacaattttcctcttagcaagacaaaattttcttaagagcagtgttctgactcggtagctgggaaaatggctcataggaaaattgtatgaaaattatatgatcccagaaagagcttgggttgaattccttcctgacgtctgctggttggaagaggcagcgtaacaaaggagtgagcctcagttttctcacattgaagtggatgtaataaccccagtgcgacctgccttggggagttgtgtggcttagatgtcctagctactgtggaaagacctcgggataggggtgggggtggggttgggggtgtgtgcgactgaaccctggaagtggccagggcagctctcaccgcgcacgtgcactcactgcccccagtggccttactgcgagaagcgctgcagttactgcaacttcaacaagtacatccctcgccgcctggaggaggctgccatgcagaagtgtctggtgaccgaagctcagacgctgctgcggctcagcggggtgcaacggtgggtagtgggggctgtaggcagcgttttgggaaatatttggaggagtggtgggggataggtgcaggcatcccagagggctcccccaggtctcatttctccattctctttccccagggtggagtctgtgttctttggtggggggacccccagtctagccagtccccacacggtggctgctgtcctggaggctgtggcacaggcagcccacctgcctgcagacttggaagtcacattggaggctaatcctacttcagctccgggctccagactggcagagttcggggcagcaggggttaacaggttgtctataggcctccaggtaacccatggcactcaccccatcccagtgcaccccgcccttcagtgccatctcctctttggtcacattcattcattgggcaaacattgattgagcaccttctgggtgccagggacacagtagggcctagtgcgacacttttataactccttaattgtctgctgctgtcatagaccacagactttatgagaaagggatcaggtgtggcttttctatttcaaacacttaccatagtgcctggcacatagtaggtggtcaaaaaagatttgctacatgacacgggagacgcagacatgtagccagattattgcagcatggtaaatgtcacctgtaaagggggtctctataaaaggcttctagagtacagcctgaagggaggtcactctgatgaaatcactgaaacttctctggaggagatgtttgaatgaagaggaagagttcaccaggtgagggggtgtgggggaaacgacacaggccatggaagagcctggcatgttttgggggagttgtgagtcattccttgtgattggagaggctggaaacaaggttgcaaggtagagtccaaaacctttggtgcctactaaggagtgtgggttttgtcctagtaatgatagggagccattgaaggtttttaagtagggagaaacctagtcgtctcaggttgacctccgatatttccgtaggacttccgggttgtgggctttgttctgatggaatatgctgacagaaacacatcacttctaagatattcttaccccaaagcgcatatcttgaatctaattgtcaggaaaccctgaattaagagatttttacaaaattattgtggtaagaacagacagcatgagatctaccgtcttaacaagtttttaaatgtacatacagcactgttaactataagcacagtgttatacagccaatctgtagaaattattcattttaaataattcatttaaataattataattcgtaaataataataatttatttaaattcattaaattattcattttaaacaactggcctgtattcttcaaaaatgccagtgtcatgagagacaaagaaaggctgagaatctaaaggagacagaagagacagctgaatacaatgtgtggcccctgactggggaggaaggaggaaattactacagtagatgttattgggaccattagccaaatttgaatatgacaatgtattatgtaatggtgttgtgtcagtgttgcatttcctgaactctgtaattggattgcagttatgtaagagaatgtccttgttctttaggaaatacacacctaagtatttagaggttagggagtataatatctataactgctattcaatatagtggccactagccacagactagtgagcatttgaaatgtggtaagttaagtttaattcacttaaatttaaataaccacatgtggctactacctatcatattggacagtacagatatgaacatttccaccattgtagaaagttcttttggacagtgctggtttataatttactgttaaatgattcagcataataacaggtatgtatgtttaaagagaaacaaatatggacaaatggtgaatcaagatgaaggttttttttgtgattttctttcaacttttctataggttagaattatttaaaattgaaaagtaaagtaaataaagacttgattttggagtcagacagtcctaaattccaggtcgaactttgcaactgtatggcctggacaagttacttaacacctctgaacctcagttttctcatctgtaaaatagaactaatattggagggttacaaagattaaattagacactacataaaggtgcttggcacatagcgacccttctgtgaatggcagctcttggtgccagcttgaccttccccctcctgccttccagctgcctgccacgtgctgcgttctccctgtatctgtgtctacaatggggaggagggttcttgtctctctctgagctgctggtatgcttacacccaccctcttttcccagtccctagatgacactgagctccggctgttgggacggacgcactcggcctgcgatgctctgcggacgctggcagaggcccggcgcctctttcccgggcgcgtgtctgtagacttgatgctggggctgccggcacagcaggtggggccgtggcttgggcagctgcaggaactgctgcaccactgtgatgaccacctctccctctaccagctgtccctggagcggggcaccgcactcttcgcccaggtgcagcggggtgcccttccagcccctgacccggagctcgcagctgagatgtaccagaggggccgggctgtccttcgggaggctggcttccaccagtatgaggtctccaactttgcccggaatgtaagttctggggctgatggctggaggtggaggatgggcagactgcagtgtgaccagggcgttgtgaccttctgaagagaaggatcctggccgagatggtgggacattctaacctggggccccttacctgagtctaaaaatgaggcctgccctcttcactctgcactatttcctccctccccgcagggggcgctcagtacccacaattggacttactggcagtgtggtcagtaccttggcgttgggcctggtgagtcccgtgaactacagaaagggtgactcaggagaggaatgtcgtggctgtgtgaacttgggccacattaacctctccaagcctctattttctcatatgtaaaatgtggcaaaaaataatacctccctatagaactgttgagcatgaattataaggggcttaatgttgcaccttgcactagggttctcagcctttagtgtgtatgagaatctcctggagggcttgttaaaacccaagctgctgggccccaccctcagaattcccaattggacagggctagaggagagcccaagaatttatatgtcttggcattttgggatagatgattaaaaaaaaaagaaaaagaaaaaagggcctggtgtcatgtgcctctaatctgagctacttgggaagctgaggtggaaagatcgtttgaccccaggcgtccaagaccagcctgggcagtatagtgagacaccacctcaaaaaaaaaaaaaaaaaaaagaaagaaagaaagaaagaaaagaaaagaaaaataatttatatttccagtatgttagaggcagttgctccagggaccacatgatttaaatctggtaaacacatagtattaacagccattaatgtggggatggttgttgatgttgtcaggggcccatggacgatttatgccccagggggctggaggccacacccgggaggctcggatccagacactggagcctgacaactggatgaaggaggtgatgctgtttggccatggcacccggaagcgtgtccccctgggcaggctggagctgtgagcatccaagggcacagggctctcctccaggatccccacaccccaagaccatgtctatttgtatatcttttatttcctgtcttgtcctggcccctgccttgccacatactgtatggtccctgttagcctcctctaaatgcatcccagtgtagaatttggagaatgggaggagcacaggcctcctctctaagactccttggtgatttttctttgaggctggaggaagttttggccctggggctacgcaccgatgtggggatcactcaccaggtaaggagttaggattcttgcacaccactccctcctaaagtcttgcagaatcaatgccccctccctgccaccccccccacacacatatacctccaatttctgtgagattggcagctagaagtggggcccaggtccagctgaggcctgatgggcagaagcagtgagcagtggtgcatagctaagaaccctagaccagggctgcagagacccaagttccagccctcattttactgcaaccttggacacaaatcctttcacctctcttaacctcaattttctgagctctgtgaagcaatagatagataaagggtttccacttgtttttagggagcactgaaacctctcataggaagcacagtagataattatcaagcaaatccagagctgctctggataaagcagagccataaagccctggctagagctggctgagaggggagggaagagaggaggcatagaggaaggcctggcttggctggaagctgggttccagtctcagtggaataggagtgaagctgccctcctccctgctggcccattggcctggttctgctttcatgcatgtcagctgctgagatctccatgctgaactggaccctcccccacctctcaccataccccaactatgtggcccagagtagccaggccagctccccacctctgaccctctggcttccccagcactggcagcagtttgagccccagctgaccctgtgggatgtgtttggagcgaacaaggaggtgcaggagctgctggagcggggcctactgcagctggatcacaggtgtgttggggggtgccgggcagagggggctgaggcataccagggagccctgactacagctctccacagacccaggagaagtgagaaagactgactggtaaggcgggacctgcgggtgctgggagctcggccctgctgggtgatgggcttgaaattggtaagatgaagtagtcaccttcaggcctcttggttttccaggggtcttcggtgttcctgggagggtctggctgtgctggactctctcttgctgaccctcctgcctcagctccaagaagcctggcagcagagaaccccctcccctgtgccaggaggatgacaaaaatgttcctgtgttccagggtaatgccaggtgggttttgagagctgggtcggtactgcagacatctcttctccgttgtcgggtgccgtctctgctccttgtggttattgctcagccctggcatccccaggggaatggcagcagtgaggtagatgggaggacatttctggtcagggaactggcatcccattcagcatctcaggactcacaggccaacatgtgttccatggctgggaattgcctaccacccacatcagcttctgtttacctttttggcatcaaataatgaacagtgtttggaaatctttctacaggcaattacctccccaagagaagccttccttattttggagtaaggtcctaagatagctggatgaatcaggaaaaccatgtcccctctaggtattattaatataagcaggaagggatctactataggaatgaagtatttataaaccactgaaagggatagagaagtgaacattggagaaagccagtagcaactgtgagaaatcagcaacttgcaggaggcacagaaaactcctgctgatggtctcagcttccagcagcacaaaagcagatgatgtactggaaaatgctcagaagatgctacaaaacctcatgcctactgtctgccactgctggagaaggaatcatggtttctagaagtgcctctcattagtggactttaaagcaaatcctggctggcaggaaattctgaggaatatagctcttaggcttccagcctctaccatgcaggagagaacacagaaggactgatgtatgttggtggatccatgtatgtgtccagcacagcggcctgctggactctgagaactgggaaagatcagagcaagccttgcctcttatcttcgggaaaccagaatatgtttggggtggtaggagccacacagactcttctgagccccctcactcacttccttccccctgtgcctttcctttgagagtgaaggtgggtggagttgaccagagaaaggggagagaattcgggaaagacccaaagtgtttgtaattcttctttgtccttttacctacagaaatggtcacatggttctatttaaatagcctaataaacacatctggagcctgtcttgactgtggtcctctcctttgagctccttcctagagcgtggaatcctgattttgggactagaaccttagcctagggctgagattccttcccccgctccctacattttattttgaaggatttcagacctacagaaaagataaaagaatagttcattggaagccatatatcctttgtctactatgtaactataaagtctggaaataggcaaatattcataatgccatcaagaacatcttcaatctattgaaaaatatgataggccagatggggtggtgcatgcctataatcccagcacttggggaggccaagacgggagaatcacttgagcccaagggtttgaggccaacctgggcaacatagcaagactctgcttccaaaaaaaaaaaaaaaaaagtttccatactttgtggttaccctatagattcatcaattgttaatttttggccacatttacttcatctttagataaatatgtctgtataattttttttctgaataatttaaaagttgtagacatcaggccaggtgcagtgactcacacctataatcccagcactttgggaggccgaggcaggtggatcacttaaggtcaagagttcaagacctgcctggccaacatggcaacaccccttctctacaaaaaagaaaaaaaaatacaaaaattagccaggcgtggtggcacgcacctgtagtcccagctactcgagaggctgaggcaggagaatcgcttgaacctgggaggtgaaggttgcagtgagctgagattgtgccactgcactccagcctgcgacagcgagacaccgtctcaaaataaataaataaattcattagctacatacaatcattgtagataattttaacctttctccattaaaaaagagctttccattttttaaagggctgatactttttttttttttttttttgagacagggcttcactgtgtcgccaaagctggaatgccatggcatgaccacagctcactgcagttgtgacctttcaggttccagtgatcctcccacctcagcctcccaagtagctgagactacaggtgtgcaccaccatgcctggctaattgtttttttgtagagatagggtctccctatatttcccaggctggtctcaaactcctgggctcaagtgatcctcccacctcggcctcccaaagtactgggatgcagatgtgagccattgtgcctggtgaaggggtgatactcttaacctggaagttgtatgttatatgtgtgagacagagggagtggggaggggcattttcctgggaagaggctccataagtttcataccttatgtcatagggtaccatgatgccagaagtaatctagtaccactgccaaatgaggcatgctaagctcagcctctagctgagtgactaagaatggggcctccccacctctcaggtaagcacgtgcgtttcccatgtgcccagtgggtgtgaatatcagtccttccttgaccctgtggtaatatggtaagtgttactacctctcctttattcatgaaatattaagcaagcacaaatggtgtgccagggactgcactgggcagcagggaggaacaagacctgtcttggccctcgaggcactcactgccatgttgatagatgtgtaaagagattaattccaggcttgtcagtcaaggtgtgcaggcaggtcgttggagccaggggcacgtttggttcagagggactaggagcaggacaggggatacccttttcttaccacctccattgcccctgctgccctggaaagcctggccctggggcagcctgtggggtcacccgtgctgctcggggagctgtttcctgagacttcccctgatcttgacattcaagaagcgagcacggggccgaggcaggtgcgccatcagataacctgggaccactcaggtttctcccagctgccagggctcgtgccacttgagacatccgggcgctccctgccaggacacctcataaggcccgtgcagaggagctgggtaggagccagggccaagtcggggtggcacagatcaccttctgtgactcagtctggtctttccttcaccagatgaatcagaagctcccggaggtggagccccagaatctagtttttcaatgctcatacatggccctaatgatcattcccttttgggaacctctgattacaatcatttcttgccttccatgccaggaggctgggggcaggaggaaagggagacatggctatttccagtgtcctgtgacaaagtgggaaggggggccttcatttcacatcccagcccttccatgactcatccatcagggggcttctcctcctccatagtgggacctggcttgtcatcttttcacctgctctacatggatgcaagtaaaaggggtgaacaaccccctttggtgatgaagttggggacatatagtacatgtgggtatgtggttacagcttgaagcaccaaaccctctgtgtgcaggcagagcactgatcatttgaaagccctccaactgagccacccctccctgctgccgaattgtgtgaggtcaacaggacagctcttttcatttccatcttacagatagggacattcatggaggccctctaactcgactcaagtcctataagcagtaagcagaaggcccggtataacacttctgggcatccagaactttgtgtcccatcgttgttttctccttgctgtaggtccaggtcaagtggtcttcctcttaaattaggcaaagtccagacctctcaaatttagggacagggagggtgagggtctcactgtgtcccccaggctggagtacaatgttacaatcacaactcaccgcagcctcaaactcctaggctcaagtgatcctcccacatcagctcgccagccccttgtagctggcatcatgcctgtgagaccgctcacttctcctctcacatccttctgcaaagaaaagaactttaaataatagaatgaaatcacttgtgtggtagattgtatcatgtccaaaatgtttgctacccctccttggcatgagcctcacctgagggcctggggaggattatatacccctaccttgttgaacctggaagggccacgaaacttgcctggcactggttgtaagagccggtgggtggtccatcagctctctgttgcagtgacctgcaatgttcacatggagactgttttgtcagcctaggtcccagggtgaagaggatggtcagagcagccagccacaatagacatgaagagtagagagaaattaacccctgccattgtagaccagtagactttccagttgttgctgcaccatatttgagactaaactgtctgattcagtttgtaatcccaccattcaaagattagccattgttaagattgtggtgtgtatcttagcagaaattctgatatgcaaattaatgtatttagatacacaatcttacaaaaatgggataatacacatcttgctttgaagctttattgtcttatctaatatgtactaagtgtctttccatggtaaatttatatctagatccaatttttcagtgttgggatcacagtatggctccatagtgtactaatgcatggttatgccaaaaaatgttgttttcccagtttcttttcttttctctttctttccttctttctttcttttcttttctttcttttttttttttcatctctgtcacccaggttagagtggagtgcagtggcacagtcatggctcactgcagcctcaacctcctggactcaagcaatcttcccaccttagcctcctaagtagctggaaccaccacacctggctaatttttaaaatttttgtagacagggttttgccatgtaactcacgttgcttttgaactcctgagctcaagcagtcctcccccgttggcctcccaaagtgctgggattactggggttacaggtgtgagccaccgccctcagcctccagttccttttttttttctttttttgagacagagtcttgctcccttgcccaggctggagtgcagtggcgcaatcttggctcactacaacctctgccccccaggttcaaacaattcaacatcaacctcccaggctcaagtgatcctcctgcctcagttctccacccctttgtagctgatactacagatacacaccagcgtgcccagctaatttttaaatatttttacagagatgcagtctcactatgttgcccaggctggtcttttttttttttttttgagatggaatcttactgtatcacccaggctggagtgcaatggcgtaatcttgcctcactgcaacctctgctgcccaggttcaactgattctcctgcctcagcctcccggtgtagctgggattacaggtgcctgccactgcgcccagctaatttttgtatctttagtagagatgaggtttcactatcttggccaggctggtcttgaactcctgacctcgtgatccatcttcagcttcccaaagtggtgggattacaggtgtgagccaccgcgcctagccaccctggctggtcttgaactcctggcttcaagtgatcctcccgcatcaatctcccaaagtgttgggatcacaggcgtgagccactgcaccccccttaatttttaataaatataaattctgtgatgaacatgttacgtaaatatttttatgcaatggtttgatcattttcttaggtttaggttaaatctcaagaagtggaattgctaactctaaggatttgcacatcctttgtttggatacacaatgccagactaccctccaggaaggctgcccaattcacaccacttttgccagcctgctagtgctcttttctcaacctcatcaatggcaagcatgatcaatttttccagatgattccaacttgaagagcattccttttttattttttttttgagacggagtctcgctctgtcacccaggctggaatgtagtggcttgatcttggctcactgcaacctccgcctcccaggttcaagcgattgtcttgcctcagcctccagagtaggtgggactacaagtgcacacccccacacctggctcattttttgtatttttagtagagatggggtttcgccatgttggccaggctggtctcaatctcttgacctcgtgatccgcccaccttggtctcccaaagtgctgggattacaggcgtgagccaccacacccggcctaaagagcattcttgatcctagctttatcatcagtactgccttggcaactgtttcatccatctgattgatcactgccaagtcagaaagcaaaggggatacaacctctgggaccacctaggtagaagactgagctggaattcagtctgatttccatgtcttgtacattacctctgagtttctcttactcagccgaccccctcctgggagaatcctaggtctcccttttatctttctctccctgctgtcccttctccctgaggggatttttaaggccaattttaaaattattattatgaaacaaataacaaaatagaaacattggacagaattctaaatgaaaaagaaaaaaggatcacccataatcagtggtcccaacaaaatacatttttttatttgccttatttgcttgtgttcccttccagtcctagtccaaatgcaagccatatttttacccagatgtgaccctggcccagatctaattttgcattctgcccctttcaattctcttgtcataagcagttttccacattgctacatggtcatcatcttattctaattgttgcacaacgttccaatgagtgaataatttaatcatcattaccctaatgtaagtcacttacatggttgctcaattttcctataataaatactgctgtagtgcctgcttttgtggatatggcttcttccttcatttgaattatttcctcaggtcaattctcaagagtgagataggtcaaaaggtatgaaggctttaatgattcttggcatgagaaccggaacattgttttccaaagggtttttctttctttctttttttttattttcctgctcaaaagttaatacatgctatctttcaacaatttagaagaaagcaaaaattctactacccagaaattaccactactaacatttggccaaccattcctccaggcatctctggatatacacatctatctatatgtataatctgcatagatatacatatagatgtagacataaaaataatttttcacaaaagagatcacatccccatgccagttttgcaacctgcttttttactcaacaacatgtcctgggtttttctaattggttctgccaccaccagtgcctaggtggtagcaaaatgtagtacagcagtagctgtaagccacacactgtaccaagaattttatgtacattagctaatttaagctctgcaataaccaaatgagataagttctattatcatcatgcccattttacaaatgaggaaacaggctcagagaaattgcacagggtcacagagctagggagtggtggggctagcactccaaaacagatgtttatacaagtaatacacgaacacatgtctattgtaaaagataaaaataataaatgcaagcaagagcatagcatagaaactaaagtgtgggccgggcgcagtggctcatgcctgtaatcccagcacttcgggaggccgaggcgggcggatcacgaggtcaggagatcgagaccatcctggctaacatggtgaaaccccgtctctactaaaaatacaaaaaattagccaggcttggtggcgggcgcctgtagtcccagctactggtgggggctgaggcaggagaatggtattaacccaggaggcggagcttgcagtgagcggagatggcgccactgcactccagcctaggtgacagatcgagactctgtctcaaaaaaaaagaaactaaagtgtgaaagtcccatttacacttccacagaggtttggtgtgtgtatcagttaagtttaggttcaattgcatgtaacagaaaaccaaaatagcataggcttaaacaagataggatttgttttcttcacgtaaaagaagtctgcacatagcatttcagggctagcatggtgggcccatgctcattagtcatgaagaacccattttcagtttatggcttcgtccctaaggtctccacgtggactaatattgtccctggagctccagccatcatgcctgcattctaggcaacaaggagaaggctggaggagcaatgccatggtttttcccagatgaatcagcctctctctaaagagctttccctaaagtcccccaccctatgatatagctttatttcttttctaaaaaatttttttttatttttttgagatggggtctcactctgttgcccaggctggagtgcagtggcacaatcttggttcactgcagcctccacctcccggttctagtgattctcctgcctcagcctcccaagtagctgggaatacagacgtgcaccaccacgcacagctaatttctgtatttttagtagagacagggtttcaccatgttggccaggctggtctcgaactcctgacctcagatgctccacccacctcagcctcccaaagtgctgggattacaggcgtgagccactgcacccagcctgatatcagtttatttctaattggccacccctatccacagggagactgtgcagtgtagtttttaaactgagcattttgcagcttctccaaccccagctccccccataatacaagtgcttggttaactttttttaagggggaaagaatggatattaaaagaaaattagacaattctgccaccatgtatatccttcccaatcctttcttacaaatttatatatgtatatattgtgaaagttgattgtacaaattgggtcattcttgccatactcaactaaatcagagtcaatgggttgggggaaaaagcacttgggacacataacttcgctccaagaagtacattttccacgagcttggctgctgaaactgcctcttgtaacctgaaactagttttatctgatggctactgaaacaacctgctgcaactctaagactggctttacccaccaccttcactcaccagtcagcacttgccatccccaaaaccttactggcaccaatgagctatctttcaaaacaattctccatttcataaaacccccaagcatctctttgttcgttggctgtactaaagaccacccagtctgtgtgtatgccccaaattgcaattgttgcttctgagataaaatgttaaatttagagattcatctctacatttttattttgactttgacagtatgtacatatataataacatagttttaaatggtacattgttttaatttacattttaaagccttactgaccagattaaacattctccattaaatatttgtttactaattattgtgttgtgtgcacagttaagctctttgcttatttagccaattaaaacctagaagatatcttgatccagttgaatggactatcaaggtaaagagatagaggcagtctcagtggctcacacctgtaatcccagcactttgggaatccaaggtgggtggatcatgaggtcaggagatcgagaccatcctggccaacatggtgaaaccctgtctctactaaaaatacaaaaattagctgggtgtggtggtgtgtgcctgcctgtaatcccagctactcgggaggctgaggcaggagaatcgcatgaaccagggagtcgcaggttgccgagatcatgccactgcactccagcctgggcaacagagcaagactccatctcaaaaaaaaaaaaaaaaaagagagagagagataacaaatagatgaatagacgataggtatattaactctttgtattacttgctgcaagtgcttctaatatgctatcctttttatttttcatggattttaatttttttggaagtgagttttccagaaatttcaactacatttatatatttaagtccatcttttgccttggggctttttgttagtcccaggctcagacgttagtcccacctccagagatatggttggtgttgaagttggccttctcctcccaagagggacagtctaatgttggtggctaggcccacctgggttctaatttgaatcttgactgtcacttcctactatacaactaggaaaaacacatctgtcatctaagttctagttttcttgactgttggtgagggagttgtatcaaccccaggttcttaaacttgtctgtgcatcagaaccgtcagacgctccaaattgcacattcctgcccctccacctccacacctcagctcagatctacagaacccgaatcgctgtatccaggagtttgtattttttaaaatgctcccctgaggctgacattcagacatgttccagaatcgccgcaccagccagtgtctgagagtgcctcctacaccaggctctctgtgcagtgggtgagtgagatgagggtggtggcccttggccactgtgtcccccgaagccagttggccctgccttgtcctcttgggtcagagctcccatttcacatccaacctgagccgcagcccattctccctgctttctcagggctggggctggggctgggggtgaaagggtgatcaggatcctgcagtgtgagtggggttgtggggctgccacagcaatgcccctaggaggggccagtgttccctactggctggcttcccttagtgaagcctctcatcctgtgaatctccacctcttcagctctgacagcaggactgagaccatgccttccttgcaaggcagtcctaaggtctgcgatgatgggtggatggaaaaagtctcgagcagttcctgccacaaaatgtgcatttgacaaatgtggtagatgttactattagtgctttctttttttttttctttttctttctttccttttttttttttttgagacagagtcgttctgtcgccgaagctggagtgtagtgacacgatctcagctccaccttctgggttcaagagattttcccgcctcagtctcccgagtagctgggactacaagtgctcaccagcatgcctggctaatttttgtatttttggtagatgtggggtttcaccatgttggccaggctggtcttgaactgttgacctcaagcggtccacccgtctcgcctgcctcggcctcctaaagtgcaaggattgcaagtgtgagtcaccgcacccagccactattagtgttttcattggaatttacagttgtaagggaggcaaaattttatcccctaccatcttggggttttttggctgggactcagaattaaactgacataagacagattaacaggagaaaaacattcaaatttatttaatacagtttttatgtggcacaggagacttcataaggaaatgaagaccgaaagatgcagttagaattgaacactcagctaggcgcggtggctcacacctgtaatcccagcactttgggaggccaaggcaggcagatcacttgaggtcaggagttcaagaccagcctgaccaaaatggtgatgtgaaacccccgtctctactaaaaaaaaaaaaaaaaaaaatacaaaaattagccaggcattgtggtgtgcacctgtagtcccagctactcgggaggctgagacaggagaatcacttgagcccgggaggcagaggttgcagtgagcagagattgcaacactgaactccagcctgggcaacacagtgagactgtctcaaaaaaaaaaaaagtatacagttgaacactcaaagactgacttggacaaagggtagtaaattatgaaaatctgagcaggctgttgtgcttggggtagggtagttaattgggtagaaaagtgactaggaagataatggttagtttaaggaggttggtttgtatagatttacctcagcctcaaattcccatccttgataataagaatgatgttttcctctggtatagaggggatgtgttttacatgggaatttcatctactgcttttttttttttttttttttttttgagacacagttttgctcttgtcacccaggctggagtgcagtggcacgacctcggctcactgcaaccttcgtttcccgggttcaagcgattctcctgcctcagcctcccaagtagctgggattacaggcatgcaccaccacaccaggctaatttttgtatttttagtagagacagagtttcaccatgttagtcaggctggtctcgaactcctgatctcaggtaatccacccaccttggcctcccaaggtgctgggattacaggcatgagccaccgcgcctggccatctactgcttttaagaagcagaaggttgggaggctgaggcaggcggatcacaaggtcaggagatcaagaccatcctaatacagtgaaaccctgtctctactaaaaatacaaaaaattagctggcgtggtgtcatgtgcctgtagtcccagctactcaggaggctgaggcaggaaaatcgcttgaaccggggaggcggagtttgcagtgacccaagattataccaatgcacttcagcctggacaacagagcgagactctgtctcaaaaaaaaaaaaaaaaaaaaaaaagaagcagaaggggccaggcatggtggcttacacctgtaatcccagcacttcgggaagctgaggaaggaggattgcttgagtcagaggttcgagaccagcctgggcaacatggtgagacattcatcactataaaaaatttttaaaatagctgagtgtggtggtgcagctgtggtcctagctactcaggaggctgaagtgggaggattgattgagcctgggaaggtcaagattgcagtgagctatgatcgtgccactgcactctggcccgggtgacagagtgagaccctgtcttaagaaaaaaaataaaaaagcagaaggaaggttcacatgatcttcttgcacctgctatttttcaaatgcctttaactcaaaatagtcaataagccagagcagcagattttagggtagcatgttcttaactccacggtgccctgggcatgctggctctagagaacacaggtcttgaacaggaattcctggtgcctgacaagacagagagagacctgtcatttccctgtgctgctgaaacttcagtagacagccctgactcctggaaatttttccctctggctcagcatagaatttgtcacctcctgggtggctgggaggctgtgcaccatgaggcccactggcagcctccaggcagtgggcacccacactatgtgactcctcctaccagtgctccctgccttctctcagcaggtcaggcaggagcggctccattcctcaagtggctgactaatccgggcagggactgccccacctgcctcccagatccctgacacccgggacaccccagaggttgcctttcctctgccctcactctagattaggcctctcttggagccctccctgcaggcagggcctcggcttagggaggctgctttagatcttcggggaagttgctgaggaaatgtgcccctcctcccagtccccaccaagcatggacccttcagattaatctactaacaataataagatgagctgtaaaaaccatcaggctggcaatcctcagcttgagcgaagttcaaaggtcacaggacaatttaaggatcctgctcacacaccctagtttgagcacaggagccctgaatggctcccacctgggtccccggagtgtgcatactgtgttcagattccagctctgctgcccattcactgcttaatcctgggtggggcacttagccctgctctgcctcagtttcctcatctgtaaaatgggaatgctaatgatattctctacctcacatggttgtaaatgttcaggaagttagcacccataactaaaacaccaaagaaaaatagatacattggagttcatcaaaactttaaaaatgttgtacatcaaagggcactattaagaaagtaaaaagaaaacccacagaatgggggaaaatatttacaaattatgtatctgataagagtttaatatcctcaatttataaagaactcctacagctcaacaatgaaaagacaacccaatttaaaaatgggcaaaagatcagacgcagtggctcacacctgtaatcctaacactttggaaggccgaggtgggcagatcacttgaggccaggagttcgagaccagcctggccaacatggtgaaaccctgtctctactacaaagacaaaaatgggccaggtgtggtggtgcacacctgtaatcccagctactcgagaggctaaggcacaagaattgcttgaacctgggaggtggaggttgcagtgagccaagattacaccactgcactccagcctgggcaacagagtgagactttctctcaaaaaataaataaaataaaaataggcaaaggatttgaaaagatgtttctctaaataaaatacacaagtggctaataagcacatgaaaagatgctcaacatcattagccattaagaaaatggacaacaaaactatgatatgacccccccaacccccactaggatggttataatagaaataataataataacaagtgttggtgaatatgtggagaaatcagactgctggtggggatgcaaaatggtgcagcttctgtggaaaacagtcttgcagttcctaaaaaagttaaacttagtgtcaccatatgatccagcaactccactcctaggtatatgcccaagagaattaaagacatgtaatcatacaaaaacttatgcacaaatgttcatagcagcagtattcataatagccacaaagtggaaacagcccaatgcccatcaattgatgaatggataaataaaatatggcatcttcatacaatgaaatattattcagcagtgaaatgaatacatgaaaacattatgctaagtgaaaaaaaaagacacaaagtaggtctatactgtatgatttaatgtatatgaaatgtccagaataggcaaattcatagagacggaaagtagattagtggtttccagggattagcgggtagggaagaatggggagtgactaatgggtacagggtttcttttgggatgatggaaatgttctggaattgaacagtggtaatggttgtacaaccttgtgaatatactaagaagaaaaaacactgaattttatccttaaaatggtgaattttatgttatataaaattttttatgtaaattatctcaattttattcaaaaaggaattattacacataaaatgcttagaaggctatgcaggccatgataagccttcagttagttgccatttagtttataaactccactgaatttatgggttggtccagatttccgaaggaaaacataaaaggaacatcacctttagaaatcgaattcatggcctggcgcggtggctcatgcctgtagtcccagcactttgggaagctgaggcaggcagatcatgaggtcaagagattgagaccatccaggttaacacagtaaaaccccgtctctactaaacatacaaaaaattagccgggcatggtggcacgcgcctgtagtcccagctactcgggaggctgaggtaggagaatcgcttgaacccaggaagcggaggttgcagtgagccgagatcgccccattgcactccagcctgggtgacagaacgagactccatctcaaaaaaaaaaaaaaaaaaaagattgaatttgcatacttaatacatgttaaagcatttatttgcatgtagtttcttctctcatttcatactccatcttgatttgacatgctttatatatatacatatataatatatataagcatttatttgcatattgtttttaaattgtattttcatgatcacttttatcacttttgatatttttgaggtgtgtccaaggcttaaatcgcatttgtttttgaagtctcaactggattgagtctaggactgccatgtagctcagggaatccgcttatggtcaggcctgtgaaacagcaggatgctctttgactttgggctgaaagcctgagacggaggcttagctccattgcttacaagctatgtgacctgggacaagactaaggttgtcagctttagcaaacaaaaatacagacacccagttacatttgaatttcagataaacaatgtatattgtttaatgattttgtttaatgatatattgtttaacgatatattaatgaagaacaatgatattaaacaatgaccagataaacaatgaatatattttttgtgtaaacatatccaaaatattatatgggaaatacttatactaaaaaattattttatatgaaattaaaatttaatttatctgtgagagttttcaagggaatcatatttaattctcacaacgccccctgctgccctttcccatttttgtcatgaaagagactgactcggagaggttaagtgacttagcccaaggtcatcgagctagaaaattattgagctgggatttgaacttgggtgcgtcaactgtagcatgctctgctactggaactcaagacagatatgtagcaacctactttttttttttttttttttgagacagagtctcactctgaggccaggctagagtgagggcagtggcacgatctcggcttactgcaacttctgccgcccaggttcaagcgattctcctgcctcagcctcatgagtagctaggattacaggagcctgccactgcgcctggctaatttttgtagttttagtagagacggggtttcactatttggccaggctggtcttgaacacctgacctcgtgatccacccgcctcagcctcccaaagtgctgggattacaggcgtgagccaccgcacctggcctggcagtgacctacttaatgatagcctgggagccatgagctaacttggtaagaacagaagctttcatggactgagacggacttttgaataggagttagagaattcgatttcaaagtgtttctatgaccctgtctgtgttagtttcctgtttctgccttaacgaatgaccacatatttagtggcttaacacaaatttatcttgcagcctctggaggtcagaagtctgaaatggtccaggtgtctgcagagctgtgttccttgtggaggctctaggagagaatctgcctcttgccttttccagcttcttaaggcttgcggcatgtcttggatcggagccacacactctgacctccgcttccattagcacatttccctctctgacgctgacccttctgccgccctcttgtaacgacgcttgtgattacatggggcccaccggataatcccggatcatctctgaatctcaagatccttaatcacatctgcaaaatcctttttgccttgtaaggtaacatatttacagcttccggcgattaggaggtggacatctgtggtggagaggttattctgcctatcacactaagagagaaatgatctagttgacttgagtgtcccaggccttaactataatccctttcatctgtatagctttcacacacattcttttttccaccttgcatccatcctggaaagtagatgaaggctgtgctgagcccattctgtgagggaggaagatgaaactcagagcggaggcctcgtgctgggtgacacagctaaaaagagactcaggcccagggcttttgattcagcatctgccccctcagttcccagccatgcatcactagaacactattctcaccgatggagaaggacaattcctcagctacccccacaatttaggaagaagtccccaaggtgaaccagctccctcagccctgaatctgccctcagaaggtggccttctgcccagagcgaggatggaggggtgcaggcagagaaccatttttttggtggaggtccacgggacagagcccagaactcaatgtccatccatcttgggcgtgtcctccccagcagcccaggctgactggaccggcgcaggaactcctgcatgctcagagggagccctgattcttagaactgtcttctcatagcagtcttcttaggagtatgttgctgtggtttgtgattctgcccctgggtgctgctgcatgggaggagccagctctctccctgccccacagatcatggaaggcagcgaccataggctcactgatgctcctgcaggctccctacacccatccattaggatggcccacatgtgccagccaggaatgggggacacagccatgaagccgacagataggctcctgcacctctggaacttgtgctttagcggggcagacagatcccacagaagtgtatgtgtaggagttctgaggatgacaaaaaggatgaggcaatagaaggtgactgtgaccttgtgagacaggcactgtccccagtctatcactctatttttgtttctttgggtttttttgaagcagggtctcgttctgtcactcaggctggagtgcagtggtgcaatcatagcttactgcagccttgatctcctgggctccaagcaagccccctgcttcagcctcctgagtaactaggactccagacacacacaaacaccacacccggctaattttcaaaatgtttatttttagtacagacggggtcttactatgtggcccaggctggtgtcaagctcctgggctcaagtgatccttctgctttgaccttccaaagtgctgggattgcatgtgtgagccaccatgcctagttcactgtccccactctaaagcagacagcccaagtgggggcaaagttgagaagcaaacacacactgtactccaaagcctctgaaaatccctccttgtgtccttcctaagaaggtcccagagtctctgtgtcatccctgaagctgaagtcagtccattctgggagcagagtccagctgtgtcctgtgtttggggctaagaagaatgtgagattcctgctgagtgtgagctgagcaaggttgtagtaaggagggcagtgatgtgatgcattgtttaaggggtgcagctgccagatgtgagtgggtgagggcagatgtgaggggcatcagccagctatgtgtgggggtggtcagacctggttggggaggcacaatggaaacaataggggagcaggccaggtgggtatgcgaaagtgagacagagtggcaggatgaaccgggagggggatcagatgtgaggggctggagaatagatgaccccgagcctcagtctttaggagggtggctgtccctgggaaatggatgatgcggtctgtggaggaaatgcgctttctatttagggaggctgtttaggagtagctgacgacatgctcagcacctggatgggtggaaataaacagagacatgaagcaataatttatgccgtgtcctctgtcaacctagccaccacctcctcctccctgggctccaggaagttgctcagagttgtggcgctgggaggagactgcgggagctatgctggtgaagcgatgctgtcatctgagcttgtgctttacacacactgggcttttttttttttttttttttttgagacagagtcttgctctgtcaccctaggctgaagtgcagtggcgcaatcacagctcactgcagcctcgacctcccaggctcaagcaatgcatccacctcactctcttgagtagctaggaccacaagggcatggcaccacatctggctaatttttagaaatttttttgtagagacggggtctcactatgttgcccgggctggtctcaaactcctgggctcaagtgatcctcctgcctcagcctcccgaagtgttgggattataggcacaagccatcatgcccagccccctccaggcctttgtaccttctgtgtcctcacctggagtacctgccccctgaactacccattgaactctttatttagtggcccacctcctctaagaagtgctacctcctctaagaaggcccccctcatatccagtctgtggttcctaaattgcagctaatgactaccccatgagctcacacattagagttggaaatctactttcaaatgaccccactttgtgtctaaagcactctgaccttcttctacccccaccccagtcgcacatcagtgagcttcagggaatctctggaattgaatacaaagtcatgtgcaaaatcagatgtgcaaatgtatggataaacaaaatacagtatacccataaacgaaatattattcagccacgaaaaggaatggagtcactgatacgtgttaagtgaaaaaaaaaaaaacagacagaaaaggccaaatattgtatgattccattgatatgaagtatcaagaataggcaaatcagtaaagacagaaaggagcttagcgattgttaggggatgggggtcggggctggggaatgactggtagagggtttcctttggggatgatgaaaacattctggatgtaggtagtgtaggtagtggtgatggtggcactacattgtgtgtgtactaaatgtcactcagttgaatatattaaaatggtgacttttatgttatgtgtattttacaacagttttaaaaaaagtcaaatgcacgtttctcaggagaagattcctaggtttgattggcttctcaaaaggtgaagcagctctgatctggtctggaccccttcatgtcatgatgcagatggtgatactgggacacagacagggggtgagacctgtccaaggtcactcaggggctggtggcagagcccagccaggttgcatgcctgcctgaccacatactcccctacctgcttcttcccttgtcctttggtcaccaaaccctcccgtcacaatccccaagcctctgtcctgctcccaaacatgccacccacaagctgtgtaacttcccaaagttaaaaggccttcttcctgaaactgggtgcacggattagagtttcatgagcgtttgtcttttgctctagagtggactctgagctcctagagggcaagaggaaatgtttcttattttcctccatatcttacagagcttctgggacagccacggaggtgagccattcctgtctcccttcaagaaagaacttgccattcaccctcaaggagggcagttagctgacaacttctaacaaacattctttgcccagaggacatgctgggttggccaagactttgttagatctgcagcacagtctgaggctctcccagccctttcctgcttcctctccctcaccggccttgccactaccccctctctccgcaataaacctcttgcggtcctatgttcatctcagtgcttgcttcctggaggacccacatggcacagcacctagcctgctggatcataagtgctcagtcgcgaagtaaacggaactggggattctctagagggtagagggaagccagagcctgggcctcggagagcaggagaggggctgtccgtggaggatgcctcagtcataaggagagcaaggtctagagcagtgtgaagaaggggccatggccctggagcaggacccagcaacgggcaacacacagggaactcagggattcaccagcactgctggcatcgtctctagctcctccgctgtctggggcagctcttgcaaactcagaaatgtcccaggagacagggttcaaagagccctggccttggactttagaaaaccaggttcaatttgtgcttcccgctagtcaggtgacattacacccttctctctggagctcagtttctccgtttgtaaaatgggcttataatgtgtcccctcccttcaaccccagcatgattttgagaattgactgagaagatactacagtttatggagggcaccctgtttcgtagtttaaatgcacactcaggccaggtgaggtggctcatgcttgtaatcccaacactttgagaggccaaggcgggaggatcgcttaagcccacgagttcaagaccagcctgaacaacatagcaagaccctgtctctacaaaaaatttaataattagctgggtgcagtggcacatgcctgtagtcccagctactcggaaggctaaggcagcaggatcatttaagctcaggagtttgaagctgcagtgagctatgattgtgccactgcactccaacctgggcaacagagtgagatactcgctaagaaaaagaaatacatacatattcatttaaccctggcagtggccttgtgagagcagcattatgacctccattttatgtatgtatatatgtatgtatggatgtatgagatggggatctcactttgttgcccaggctggagtacagtggtgcaatcagagctcactgcagcctggacctcctgggctcaagcaatcttcctgccttagcctccagagtagctaagactacaggtgtgggccaccaaagccagctaattaaaaaaaaatttttttaggctaggcacggtggctcacgcctgtaatcctagcactttgggaggccgaggcgggcagatcacgaggtcaggagttcgagaccagcctgaccaactggtgaaaccccatctctactaaaaatacaaaacttagccaggcatggtggcactcgtctgtaatcccagctactcaggaggctgaggcaggagaatcgcttgaacctgggaggcagaggttgcagtgagccgagatggcaccactacactccagcttgggcacagagcaagactccgtctcaaaaaaaaaaaaaaaaaaatttttttttttttttagaatggagtctccctacgttgctcaggtcaattttgaactcctggcctcaaccaatcctcctgcctcagccttctaaagcactaggattgtaggcctgaaccactgtgcccagcagagaaaaccggctctctaggtcaaggcattggctcaagaacacacagctaacaagccgacatagctgggattagaacccaattgtctggctctagaaccccttcactatttgaggtacaatttactgcctgactactagtgctaaactttgggttgggggcagggcctgaggcagctcctgctctcatacattctgagagccagtttgacaataggcaactacacaaaaaaccgaaataatcccagaatgcctcagggctccaggggaaggcgaaaaaagcgggtgcgtttataaacttaaaataatcagaggcagcatctccaaggactgtgagaatgccccaagtcagggcaaaagttttggctggtttgggaagtgatgaaaggccaaagtggctgcagcgagcgtggacccgggaggtctccaggcgcgttggtgcgagttggggacggcaggcagggacacctaaaacctacggtacgccacgaaggggtttcagcacgtcctgaaaggcccgatccccccccagaaccgctgtgaggggggcagagggaggtccctcgacaggatgtggccttagtcgaggaaggcgggaagcaggggctggcacccccgacgccccacccgccccccgtggcctagcagcagggcggggcgaggcgggtcatgcacccctaccagccagccactcccacccagccctcggctcccgcaactcgcgggggtcctcgcccgggtcccccgccccgccccgcccggctggtgacgtcacggcgctcgtcggcgccgcctgtggcgtcacaggccgggcccgcagggctttctaggggtccgtcgctcttgaagccgccggcggcgggcgcgtgcgcggcccgatgaagaaggaggtttccaagccgtctccgcccaagttgatcggtggatgcgcgcccccgcgcggggcaccggttgctgtggacgcagtggcggccgttggctggcgggtgcggcgcagcctcggtgtctctgggccggcggtgcagggcaacgtttcatggtgccgggcggcaccatgaagtctctaaagaaggattcccgcctcagaataactccgaccagattattagaggcctcagagaatgtcaaaggttggcgctggctgccttgggcgctcgggagaacccgagaggggaagcggtccccggaaagagttcaggacacggggcctggaggatggggatggcaccagggatggaggaaagatcacggggaagtggggtactgggcataggacccttagggatggggggcaaggcaggaagagcctacagcgcactgggccttggggatggggacataggaagtgggagactgacagaggggcctcagggaccactggctggggagatggccttgcgctacctctaaccacatcttagggtggcatgcaggaggcaggatccccggactggatgaagtgcagaagagccaggaaagagtttaagggtagaagggccaggaattggggtccttgggaagaggaaagaatgaagtgttgaaaccagccaccttgatgggattatttggtagaggagggtcggggagcggggcaggcgtcacttaggattcctgctggaaaaacccagaagaaaggccttgcttggctagttctctttttgactgccttttcctaccacgtgcactttccagctggatgacacttatccagctcctttagcctggaaagaatcgctagatatgactgcttcctaccctctacagctttcttctggttgcacctgggagagccacagggcgtctgatagcggactgacttccatggacatgttctcacttgcaacccacccccttttgatcttttttggctgtttccatttatttatttttaaatttaatttttagctttttttttctgtgtgtgtgtgtgtgtgtgtgtgtgtgtgtgtgtgtgtttgtaaacagggctctcgctgtgttgccccagctagtgtcaaattcttggcctcaagcgatcctcctgcctcggcctcacagactgctaggattccaggcatggaccactgcgcccagcctatttttgtttactgagagctgattttgtgtggtactgtggctcaccagaagggtatcggtattaactgtgtgaccctggtcctcaagaaactcagtctaatgaacacctggaggagtaacctgacaaaggtagaaatacaaatgctgtgatgtaggtgcccatcgggcttaagggggctcagagcacctgagccagaccagggatggttgtaggggtacgtcttctgaagaaggtgacatctatggcagacaagaaaaaaaaggagaggtttgcttctctaggtctaggaagcagcatgagtttatggaactgtaaatgtgggaaccagaagaggctgcacaggtgggtaggtcaggggccagaccatgaaagggctttatgtactaggtcagaaagcctggatgtgctcttgcaggccctggggagacccagcctcagagttgtgaaagctcattgtgaggagaggggaccctcagaaaactaacaggagcttagtcgcttttcagtatggctttatgtttcttcacgtataaaagtccaacgttgagccgggcatggtggtgcacatctgcagtctcagctgctcaggaggctgtggcaggaggattgttccaggccaggagtttatgatcacacctgtgaatagccactgcattccagactgggcaacacagtgagacccccattattaaaaaaataaaagtccaatgctgttttatgacatactatatatatatatgtatgtattttatatatattatgtatatgtgtatatatgtgtgtgtgtgtgtgtgtgtgtgtgtatatatatatatatatatatatatatatatatatatgtattttgagacagggcctcgctctgtcacccgggatggagtgccgtggtacagtcataggtcactatagtcttgaacttctgggctcaagtgaacctcctgcctcagcctcccaagttgctagtattacaggtgcacaccaccatgcctggcaaattttttttttttttttttttgtagagacaagttgcccaggctggtcttaaactcctgggctcaagcgatcctcccaccttggcctcccaaagtgctgggattacaggcatgagccaccgtgcctggcccgtgacatactttttaatagttgagagagagggaatatctggtctcctttcacaagggcagtcaagggctttcctagccactgcctcctgctcacatagtttctgggagatcgtatcagatttgaactgctgtaaacaaatcaaggaaagatttttcactgcatatttatttttaataagcagaaaatttagtttgttaattaacccttgagttaagaacatgcaccagagtgaggagggaaaaaaaatgaagtgtttagcatgcaagatatctttttaaaaatatctcaggggagcctctaatgttgtagagcagtactctcccccagcccccatacaaggcagctaatgacccagtgtcattttgtaaccttgtgcgatgtttctccaaagtctctgactcataagcaaaaaggaaagcaaaaatagtgacttaaacctgtttctcgggacctgagagcccttttgagtcctagtaccctcccttcctgctatgcaccacctccccaccgctgtcttgttgctaagaaaccaagaaccctcctagcaatattagattcccctccccaaccaattaaagctctgccctagtagggacagcccctccatggttcccccagcccaaccctaaggtcagaatttcccaaagactttaatcaacactaaaaacgaataatacttagataaaacaagaagcagaagaaatagagtccgggtttcttctccctccatagtttccccgctccgtatctcgcttcctacccccacctgagcaccttgcttccagccctctggtccagctccgacaagagactgactaccccgtgcaagcggggtggtctcttttacccctcactgtcagcatcaagggagaaatgtcagctgggtggctcactaggagccctatcagcttgggattccagaccaaagaaccagaaagagctgggcctgtataggctcagtagtcagacatacctcagccctgtggagtcttcctgcaggtcctaaaatgatccctggggctcttccttccctggtctccccagcttgcctctgcctctccggtccatctggctctcttcatctgatgaatcattctgaaatgcacctgtcatcaactcactcccctgaaccaaagatcagatgcctgagccatgctttacaaagctgtcatgccctggtttccctctcatccccaacatcaccacctctccacctccccagcaagttttcttttttttttttttttgagacggagtcttgctctgtcgcccaggctctggagtgcagtggtgcaaactcggctcactgcaagctctgcctcccgtgttcacgccattctcctgcctcagcctcccgagtagctgggactacaggtgcccgccaccacgcctggctaatatttttgtatttttagtagagacggggtttcactgtgttagccaggatggtctcgatctcctgacttcgtgatccacctgcctcggcctcccaaagtgctgggattacaggcgtgagccaccgcgcccggccccccagcaagttttctgtgttatcgtgccactcacgtgccatgctcagccctgccccttgctttgcttggactttgacttcacctggagcatcttggtttgccgctgtacctgtgcaaagcttgcctctcctttgcagcctgcctcagcctgtggagccacctctgcagctgttcctctgaacacttcttcagagccctgaactgtgtaatccacatggatctgttccttttttgatgtctaaccaaacctattgcctgtaccgcaaatgtaggaactcctctagctatgattggtgtgtgttcctgtcacatttttcagtacctcaagagaaggagccatatcttaaccttttataccatctttgtagtttatagcacatagaaggggcttggtaagcactctcgaggagcaatttaactttaagatacatatatatccctgggcgcactggctcatgcctctaatcccagcactttgggaggccgaggtgggcagatcacctgaggtcaggagtttgagaccagcctggccaacatggtgaaaccctgtctctacaaaacatacaaaaaatagttgggcggccgggtgcggtggctcatgcctgtaatcccaggactttgggaggctgaggcaggtggatcatatgaggccaggagttcaagaccagcctagccaacatggtgaaacccagcctctactaaaaatacaaaaagttagccaggcatgttggtgcatgcctgtaatcccaactacttgggaggctgaggcaggagaatcgcttgaacctgggaggcagagattgcagtgagccgagatcacgccattatactctagcctgggcaacaagagtgaaactccatctcaaaaaaaaaaaaaaaaaaaaaagctgggcatggtggcgcatgcctgtattcccagctactcgggaggccgaggcaggagaatcacttgagcccgggaggcggaggttgcagtgagctgagatcacaccactgcactccagcctgggggacagagtgagactccatctcaagaaaaaaaaaaagatgtatatatcattttaatgaatattttaataactagaacataccactccctgactgtatgcagtaacagagcatttattggactacattaaagataactttctcagaataaccttagaccagagttttactatttcaatctaaagcaaacatgaaagattagcttctctatcactgaagggatgggagctttggcccccaaaaatcttcggcagtgttgaaagtttctattgacacgtggtaattgtgcacccaccagtaaaaagcacacatctggagacgtttaatcacttggaaagatgtcaacccagccaaggttatggataaaggaagcaaatgtcctagaaagtacagataataccaaaatatttacaaaaacagaccttcagctgatctcagttctcataggctgccacccactttggtgagtttgtgtagaagggagaagggaggtagaaatcaaagcccaaggctgcatccccacacatggcggcagatgagactggaactcggggttcagccggcagccctgcatgtgtgtttgtgtgcacagagccatgcatttaacagacagatacttccaaacctctgctgaccccattacagaaacagactgtggatgataggctgaatttattattttttctaatagaaaaacaaaaattatttttaaggataggttctcctgtgttgcccaggctggttttgaactcctggcctcaagcaatcctcccatctcggcctctcaaagtgttgggattacaagcgtaagccactgcacctggccaacaggctgaatttagaactatgtttggaatgattttggtgtgagtttttttggccaccaactctatggaaatttcctaaaaaaagttggattttgttaaccaaaacacctgcctttatgttttcgtgatattgcctcttaaagattacggtgctgtaagaagcagtggataaaaccaaattttgttttaaactccctaaaggcctcaggacttaggttttcttttgattgttttatgtagggccttatatcaaaccattctgaaccagagggaaaatgacagggttgaccagccagagaaatgagatgtgtttgatcctgttaagccacctctgtgaaaggaaggcagggagtgtgtcctcgttggagagtgacctgtgacccccttctgccccgggtgttgtcaatgtcatgctgtggctgccacaacggactcttaaatacattcatacactcatcctcagtcatgcaggtttttttttttcttagagacagggtcttgttctgtcacccaggctggagtgcagtggcacaatcttggctcactgcagccttcacttcctgggctcaggttatccttcccctcagcctcccaagtggttgggactacaggcatgtactaccatgcctggttaattttttgattttttttatagagcccagactggtcttgaactcctgggctcaagcgatctgcctgccttggcctcccaagatcttgcaactcttaatccattccttggcatgccattgcccatggggtaagccttcacatggctcactgagctcttcacgatatggcggctgctgctgtctctgggctctgcctcttccctcccacctcaccacactccagctattcaaaaacacatgctttgagttccagggatgtgctccattctttgccactatgcctctttatgttattttctttggaatgcctgttccccagggccctttcctttctccagcttcttcagctctatttaaacatcccttccttaggaagccctccctgactcccccacctcccacgcccgccgactcagggctggttgttcccccccaccatgttcctgtagttactctggctcagtctgtttcacggtcttgtttcccattgggcatgtgctctttaaagacaagctctggcatgtatccctagaacctagcacagtgcctggcatgtagaagctgcttaaacaatctttattaaatgaatatgcaataaatggccagtggtgaatgctctgcttcccccacagagattctgcactttaaccagtgtcttgtgaaaccctgtgccttcacccagaagcatggatcagtgccagcactggaggaggctggcaaaacatctagttcagttgtcccaaaccactgtgcatcagaatcacctagggagttgaaaaaagtacagctccctaggccctggctccatgcagtagtcaggaagctgtattcataaaactcccccaaagattctgaggcagacattggactaataacttgggaaccactgatttagtccaactgactctttctacacatggaaagcctgaggcctagagaggttaagtgatgcgtacccaagactgtccagcttataaatagcatagcctgaaatggaacatcttttttgtatattaaaaataatcttttttgtacagatggagtctcaactatgttgcccaggctagtcttgaactcctgggcccaagcaatcctcctgccttggcttctcaaagtgttgggattacaagcttgcaccacggcacccggaatgaaacatctttttgttttgttttgttttgtttttgagacagagtctcactctgttgcccaggttagagtgcagtcacacgatctcagctcactgcaacctctacctcccgggctcaagtgattctcctgcctcagccgcccgagtagctgggactgcaggcatgggccaccacacctggctaatttttgtatttttagtagggacggggtttcaccatgttggccaggttggtcttgaactcctggcctcaagtgatcctcctgtgtcagcctcctaaagtgctgggattacaggcatgagccaccacacctggcctgaaacgaaacatcttctgatctcaattctggctacagaagtcttagtcactgtggtgagccaggggctgtgggtagggggaccctccagagagaactcccattgccccagcaaagtgctacccaggccaccttggcagcctctgctatctatccagctggtcagctctgccccccaccatggagtctagtatatatttttacttttatttttgtatgtatatattgatatatacagaaggagctctttaaggacttaataactttctgcttctcttcagaaaagaagcgggcaaagggacctgaacaacccacacccacaattcaggaagagcctgaacctgttagcaatgtcctacaaggagatgacattcttgccttggccattaagaaggaagacttgaaggaggtgaggatgaagcccaagcttcccttaccatagaaacgtttccctgccggcagcctgagtggtctagaacaccagccatgtccctactcatggggagtgtctaactccatggaaaaacccactgaacacagattcttttcactttaccaccttaaggaattcactgtgttgtctgttttaacatttctgagattcatatagaaccacaggggaaatgagatgatgaggtatcttgcttcccatagaggtaggtgccatcattcccatttcacagaccggaggatgagtttaaggagccaaggtacagctctgggtaaagctgctaaaccctaaccccatgctttacctgggagagtcagccatctctcacccaaactgtctggaggcataagatgttcttttttttccctccaggatattactaagtcacatatctgttacacaggcatttccttgacagaacatatggacagagctgaagaaacagatctgtcagccttcaggaactccacccagaactagaacagaagagatgggtggtgctcttcctcctgccaccacaggtggaattctcctttgttttatttctttttagcaacacattcctcgccttactgaaaaggaagataaacgtgtcatcacccagaaatttatcatccgtaaactcaaacccatggatcctaggaggaaggtctgccaccttgtagcacgtcctgcgaatcctgatgaagccacaaagcctctggactactccggtacacccagtctcagccctggcttcactgtctttcaactcatgggtcagcctcaagagaaacccagtctccatcagaaagttgccctcttgaaagttgtccacccacagcttctttcccctttcttcttttatcctcccaggtcccggtgacagcttcgatggcagtgaccagatcctgccccaccacatcttggggagtctccaggattttaagagaattgcacttgctcgagggaacacccaggtttgtttgcacagaactacccggatgagagcagtcactgaagtcattttggtctcccacctgacacagtcaagcagggctggggttaaagagacagtctagtctgtaggttttgagtctgagttgataagggaccctctcccagaatagttggacacttcaggcagctgaagctggcttcagtgaagtcagggatttactgtaaggattccagagattgcctcatggaacccaaaggcgggagtacctgggtctgggtagactgcacccaaaaaggcatcaggactcagggcccacatgcctcatttccctctgctctgtgcactgtcttgattttcccttctctggagactggcctgccctcctcagtccacgtggtggaggaaggtggcttcccactgcttcctgggccacgggaagattctgtatctttccagccttcccatcatgcagtgcttcacctgtctcttccccttgcttccctggttccaggctgactctgattggtcaggcgctaaggggcctggggccctgtaagaatgcttccatttacacatgggtgaaggtggcaatcaacatcagttgtgaggacaaatacactagatgttgaccccaatcttgaaacagaagttccctttgtgggggagagtggactgacagctgctttcagggccccctggttctgggatttattttctgtcactggctactctggagtcctgaagaggagggactctcagcgcagtgggataacagcacgggtttaggcctcgggaaatgtgtgctcagccctgcccagagccttcttactgccctccacatacctatgttgtacttttcagctggctgagcggatacctacctcaccctgtctgatgaccctcatctctgctgaaggagagtcaaagcaaaaagccccaaaagaagagaagagacctccctgggccccacctcctcagcacaactttctgaaaaactggcagcgtaacacagccctgcggaagaagcagcaggaagccctcagcggtgagcagagcagacagggctcccgcccggcctccatctggcagcaaggctctgctgggttgtttgctctcctccagagcctggccttgggctgaccacatttgtgctttcactcccaagagtgtctcactctgaagcttcagtggatcctgaaatcagccctgtgagggaggctgcccgatgcagactgccaaggcccctgtttgttctggttcggcagagtggcggcaatcttgcctctctctctagaacacctaaagaagccagtgagtgagctgctcatgcacaccggggagacctacagacggatccaggaggagcgggagctcattgactgcacacttccaacccggcgtgataggaaagtgaggccacctgtcctaagtgcccgggggcaggggggtccatggaggagggggcgggggcaggtgtctggacacagggatgctggtctcaggtggcacagctggggagaaaaaacctatccattgcaaaacatcattaggccctcaaggcctttactaaattatatgattagtcagtaaagttattcagcctgtggtgaccacacaggtagcaagttattagagtagtcttagtgtttgtctcctaggagcttagactgagtggagcctacaccctaaagagagaggttgaagagtcccccacctttttttctggtagaccagtgcagtacctgtaccaacccacaccatctggctgggggcaggtaaagatgacaacagggtgtccagaaaacacggcagtggatgcttctgttatgcaatcacggcagcaatgaattccccagaggaagcatctgtagcctgtggtggtgctcttgtcttcccacatctccaccagcatctggctgaggtgtcctggtaatctgactcacctttccttccttgccagagctgggagaacagtgggttctggagtcgactggaatacttgggagatgagatgacaggtctggtcatgaccaagacaaaaactcagcgtggcctcatggagcccatcactcacatcaggaagccccactccatccgggtggagacaggtgaggcgcagggctgtaagccagctagcatcttgtgcctggcccggaggcagggtagtgtggaagtggccagcatagctctacagtgaaacaggcccagggcctgtttctctgtggttctctggggtcttaggcaagtcccagagtcttcctgaagtccggctccctcttctttttcttcagtaaaacggtgagagagctaggaaactggagtgcagccatagagctgccgtccagtgtggagccttgagccacatgccgctggtgagcgcctggatcgtggctgccctgccttgagaagtgctgtcactgtcaactggacactggctttagtgtgaaaacaatatattttattaatcatttttatattgattacatgtcaaaatgacaatatttttgatatactgaattaaataaactatattactaaaatgagggcgggcacagtggctcatgcctataatcccagcactttgggaggctacggcggatagatcacttgaggtcagaagttcaaaaccagcctggccaacatggtgaaaccctgtctctactaaaaatgcaaaaattagctgggcatggtggtgcgcgcctagaatcccagctacttgggaggctgaggcaggagaattgcttgaatctgggaggtggaggttgcagtgagccaagatcatgccattgcactccagcctgggcaacaagagcaaaactctgtcttaaaataaataaataaataaataaataaacaaacaaacaaactatattactaaaatgaatcccacctgtttcttttttcctttttcagtgtggcatctagaaaactttcagtgacacgtgtggcttgtgcttgtggtttgcattctgtttctcttaagcagcactgctttagagcctgccaggctgcctgggttcaggtcccagctgtgtcgtgttagtgaaccccagagtggttgaacccctctggcctgtagtttcctcatctgtaaaatatgcacagggttgtgatagggctaaatgagatatgaaatgtattaagaggttctggctcattgttaagcactcaataaaaggtagctgctgttattatttttattataatccaaagatttggctatttggaagctaatttttcaggagtcttgtgtagggctgctgaggaggtataggacaggagaacgggagtctagctgccacagggaagctgtatttttagtccttcctagaaatggtgttgggataggcactctcagagcccttgagaagtgggtgagcaaggggacatggcagcagcctgtgctgagggtccttggacctcatgctaggattaccagcccagagggacgcttcataccgctacacctgggatcggagtctgtttctgatctaccgacgcaaggagctgcagagaatcatggaagagctggatttcagccagcaggttggtatggcctccatgccccagtcagaagccccttggggcgatgcctgtcttcagtcagctcatcttacctttctccatctctcggaggatattgatggcctggaggtggtgggcaaagggtggcccttctcggctgttactgtggaagactacacagtgtttgaaagaagtcagggaagctcctctgaagacacagcatacttgtgagtgcagcctgaaccctggggagagaggctgaagagttctccagcacctaccagtattaaagagcgggcttccctccctgagatcagggtgcctctagcctagcttctgtccagtggttgccacccactccttgaacccattccagcacctgtgctggctttcctattgccatctgctcctttccaataaccaactcctaatggggatttcccagacattcccttgctggtcaactgagggctctctagaccctcccactgctatgcatcttgaatgcctctggcatggagagtctgtgtatttctgtgtactgtgagtggctctggcaagagggcttaaagagtctgtgtgtttctaagaatctcccatctacagcaatgggtcaggaggaagctgcgtgggagtggagttgatcatactccattgcagggtagagctggttgtgtttctaggcttcctggtgaccgtttctgtggggttccacatggcatgactgtggcagcctaagagaaaataagtcattggcttttcttacagaggcacattggccagttcctctgatgtctccatgcctattctcggcccttctctgctgttctgtgggaagccagcttgctggatcagaggcagtaatccacaggacaaggtaaaacagcctccaccacacctgctgggagagcctccctcaggggtgcagccctgaggtgactggcagttaccagcagcctgcacagtctcctgtttgggtttttatctggtcgtgcattcagcacgtctgaaaatggtgacagcaacactgacttgagcaagaataaaatcacaaggctgcgagtgtcataagccacttggggcttatacccagcccccaagcatgtaaacaagcaaactcaagtaggtatggctctaagaaggttccaaaatattcttcagatgctaaggaatagaagtgttcattggatataaaatatattttatctggccaggcgcagaggctcacgcctgtaatcccagcactttgggaggctgacgtgggtggatcacctgacatcaggagttcaagaccagccctggccagcatggtgaaaccccatctctactaaaaatacaaaatagcagggcgtggtggtgggcacctgtaatccctgctacttggaaagctgaggcaggagaatcgcttgaacccgggaggcgggggttgcagtgagctgagatcacgccattgcactccaacctaggtgacaagagcgaaactctgtctcaaaaaaaaaaaaaaaatatatatatatatatttgttttatcttctcttcttgctattgagggtaacctcagagacaaccacgctggagtaggataccactctgtgtgacagtggccaagccctggaggcctgggacacgagacttgcagtgctaaagccagaaaagtcctgggcagaccagatgagttgttcactctaggccagggtttgcagcaaagacatttcttgtccctcctccttccagaggcaggttgggattgctgctcacttgacctttgaaaccctagaaggcgagaaaacctcctcagaactgactgtggtcaataatggcaccgtggccatttggtatgactggcgacggcagcaccagccggacactttccaagaccttaagaaaaacaggatgcagcgattttactttgacaaccgggaaggtactcgggagaagccaccctatgtgctagctcctgtctggggctggttttgtcctccgtgagacatcaaagtttagttatggcccagctcctgtaagtttgagccctgcttccctgccttgtccctctcattccttctgtgaaatgtgtggcctgactactcatgtctgttgagagactgatggaacttgagaacctggggaggtgagccaccagggagcagaagcgttctaggggctcagttatctaggtgcacaggcctggggctaggatggccagctgtctctgtttgcctgggactttagcactcaaattcccacattccaggaaacctctcagccctgggcaaactgggatggttggccagccacctggcctgggactcagttaactgcatgtaggagcatgtaggcctggggctcagccagctcctgcatgttgaaaacctcgggtctctgtccctctcaggtgtgattctgcctggagaaattaaaacatttaccttcttcttcaagtctttgactgctggggtcttcagggaattttgggagtttcgaacccatcctactctattaggaggtgctatactgcaggtcaatctccacgcggtctccctgacccaggacgtttttgaggatgagaggaaagtactggaggtaagggacccaggaccatggcccctgtggacatcaggtagggtatcctggtgttcttcctggcagtgactgaagggatcatatttctcccagcctaagaggagaattggatttttagcaaacaggtaactactcttgctccacaaacacttcccagggcttgtgatttaaaagatgggtgcgctggctaggcaggcatggagcagcttgcagcaatgccatgcatggccccactgagttagaaagaaattagactgagccttaagaggcagactgtaaagtacaatgtgtggccctatgtactggtctgtgttttgttcatcgctgtctggtactacacagtggagttgcatttaagcgacaagacttcaaaaccagggagaataattaattaatacatagcagcatgagtctgcccaccgtcccactcaatcagctgacaactcgagtgagtgtgaggtgggagcttggaatctgtcgtccgcagtcagtttcacagtgtggccatttgagccgtgcatcctgggatttggtggaaagctgtgcttttttattcattgtggcccccaatcacaaggccggctccttcatgtggggctcagccagtggtgatcaaaggtaattttgacaatgtcatgcttgctttactcattgactgtacaacccatgtctcacacaaggcgcccctcccgtgtttctgtgacactcactgaagcctgatgaaggttcaccaccatcctcagaagcacccccactatgtgccctgccccttcttcctaatctggtgacatgctaactgtgtgaccaccaggccccaggcagcagcagctgtcactggaactggccctcctctggatccttttcatccatttttagggaacaaggatgtctggagagactcagaggttttcaggtcttagaacaggcgtgtgtgtgtgtgtgtgtgtgtgtgtgagagagagagagagagagagacaatggcaggaactcagaccctaggaaggcacaaagtcctgggggctccaacttcctgaaggatgcattggttttgatagcctgggctgccatcctctgccaccttcccttttgcagagcaagctgactgcccatgaggcagtcaccgtcgttcgcgaagtgctgcaggagctgctgatgggggtcttgaccccggagcgcacaccatcacctgtggatgcctatctcaccgaggaagacttgttccggcacagaaatcctccggtgaggcccagcgccagcccctgccccctcatgtgtgccctgcgtcaagggtccccaacccgcaggccgcacagcggcaggtgagcagtgggtgagccagcattactgcctgagctctgcctcctgtcagatcagcggtggcattagattctcataggagcacgaatcccattgtgaactgcgcatgcgagggatggaaattgtacactccttatgagaatctaactaatgcctgatgatctgaggtggaagtttcatcctgaaaccattccccaactccctgccatccgtggaaaaattgtcttccacgaaaccagtccctggtgccaaaaaggttggggactgctgccctaggtgacagtaatagcaaactcttttatgtgccaagctctgttctgcgcatcttccatgagtaactcacctctcttcacagcagtcctatgagatgggtactatttatttttgtttatttttttaagaaatagcgtgtcatactgtcacactccaggccagagtacagtgtcccactcatagctcattgtgacctcaaactccccggctcaggtgatcctcccacctcagcctcctaagtagctaggactacaggcatacatcaccatgctcagctaatttctctttttttttttggtagagataggatcactctatgtcatacaggccggtcttgaactcctgagttcaagtgatcttcctaccgtggcttcccaaagcactgggattgcaggcttgagccactgtgcctggcccttgtactatttatgtccttatttacattgaagaaactggggcctgcaccccagcctccccctcacatgccttcccatcctctgctgcagctgcattatgagcaccaagtggtgcaaagcctgcaccaactgtggcgccagtacatgaccctgcccgccaaggctgaggaggccaggccaggggacaaggagcacgtcagccccatagccacagagaaggcctctgtgaatgctgagctgttaccacgctttaggagccccatctccgaaactcaagtgccccggcctgagaacgaggccctcagggaatccgggtcccagaaggccagagtggggaccaagagtcctcagcggaagagcatcatggaggagatcctggtggaggaaagcccagatgtggacagcaccaagagcccctgggagccggatggccttcccctgctggagtggaacctctgcttggaggacttcagaaaggtgcttccaagaccctggaaggcaatggtagagaatattcctgcctcgaaccaacaagggaggacccagcagcccctcttgctctatgggcaaagaaacaaaacctgagagcccagagaaagtgatctcttgggttatctatctatctatttatttatttatttatttatttttgagacgaagttttgctcttgttgcccaggtgggagtgcaatagcacaatctcggctcactgcaacctccacctcccaggttcaagcgattctcctgcctcagcctcccaagtagctgagattactggcatgtgccaccacacctggctaatttttttttttgatggaatcttgctgtgttgcccaggctggagtgcagtggtgcaattttggctcactgcaacctctgcctcccgggttcaagtgattctcctgcctcagccttcccaagcagctgggactacaggcatgcgccaccacatccagctagtttttgtatttttgtagagacggggtttcgctatgttggccaggctggtctcaaactcctgacctcgtgatccacccaccttggcctcccaaagtgctggtgttacaggcgtgagccaccacgccaggccaattttgtatttttagtagagacggggtttcaccatgttggtcaagctggtctcgaacacctgacctcaggtgatccgcccgcctcagcctcccaaagtgctgggattataggcgtgagccactgtgcccagctgggttacctgtttttgtctggggtgcccaagctgctatattccaggaggggggcctactctctgaccctggcaaatcttggagaaggggttcataggtacagatttctgaggggggtccctggctcccaccaaaggcacccagacagctctccatagctgcatcccctcctggttcctggtcccctgccacccatccccacatcaccatgcccttcactagaggacacagccttggtgtcctggtgcagaatggtgcccatgaccctgccaggcagtgatggtgctccctgatgagaaccacagagaggatgcgttgatgaggctcaacaaagcagccctggagctgtgccagaagccaaggccattgcagtccaacctcctgcaccagatgtggtaggtgccctgccaggagagctgccccatctccttccctttgtggcatctgcaggggtcctgggcaggcagtcctgggactccaggggtctgagcttccgttgagctcaggttgctagagcatgccgcaaacattccacgttctggaaccctgcagtgcctactgctcactggagagcagtcacagcagatcaaacaccttatcttttttttcttcccctttttgccttgttccttctcagtgagcaggggaatggaaaaaggagaagccagagggcaggaagaagacggggggcagattccaataaaagcttcatttctctgttgtcaccctcccctgtacctgtttggaacttgcttgtataggcgtggggtccttttcaaggccctcaggacaagccccaggagccttatgctggaagtctcatgcaaggttcagcccctccagtgcgactggacccaagtctggccctggcctcaagccctctgaagtaggactgaattcatgcaggcctcctaaccctagtcctgggccatttttttcttggttgccacccaaggcaagccagaaccccctccaagcacttgccctggcggggaacagtgaggatgctggctgttcaggggtgtggcatttccacagcagctcgtggcaccagggtctttgaagggagggacccaagcctctgcaggttcaaggacaaatgaggagtgatggcatttctccactgtgtcttgccctctagtttgcagctgtggcgagatgtgattgacagcctggtgggccattccatgtggctgaggtctgtgctgggcctgcctgagaaggagaccatctatttgaatgtgcctgaagagcaaggtcagatcttgtgcaaccaaccacacctctgcatagccctcctcatctctctgaatggacaagcagcagtgcctgggccagtcatactcctttggtggaagctctgctaggttgagcccatggagtaggccccttacccctttctgtccgctgccaggatgtggtacccagaagctaccttagtgaccaccttggtttagtaatcccagcaaagttaaatgacttatccatggccattcatggcatggcagagctgggaccagaacataggcaccacagtcctgtttcatgaagccacgcgcctaccagggctcaaggctattgccctttgcttttccacctcccctcaagcctcctcacgtacctgcagcatccactaggctgttgggggcctgccatattttcttccacccacctcccttagatcaaaaatcacctcctatcatggaagtgaaggtacctgtggggaaagctgggaaggaggagcggaaaggagcagcccaggaaaagaagcaactggggatcaaagacaaagaagacaagaaaggagccaagctgctcgggaaagaggcatgctggggcgtggtctgggccaggtggggctggggaggggattggaggggctgcggaggtgggggctgtggaggtgggcatgtgcccaggctctcccagtgagctactgttgaggacatccttggcctacctctggagctcctgaaggctatgtgtgtctccctcccccagcaggaccgtcccaacagcaagaagcacaaggcaaaggatgacaagaaagtcataaaatctgcaagtcaggacaggttttctttggaagaccctacccctgacatcatcctctcttctcaagaacccatagaccccctggtcatggggaaatacacccagagcctgcacagtgaggtgaagggaagcgcccagcagccattcccctgcctcccacctgccttattcattccgttcagtctgcagacaataagtgcccactccatcatggtggaagcagagctgcttcaggaagggcatcctcgtgtgtgagacaggcctcatgaataaggaatgcgcctagcatgttaggtgatgagtacgacgggagagaagatagaccaggcagggaatggaggcacagaggcctcagtgaggaggtgacaacccacaaagatttgaagggaggggaagggtggccaagtagacgtccagtaaagagtgctccaggcatggggagcaactgccataggagggaggggccagaagggagagggcagtagtggggagcaggtcataggggtgggggatggtttgcaggctattgtgaagacttgggatttttcggagtgaaatgagaagtcacgcaaggttttgaatagaaacgcaatagggtctgataggctttagaaggtggctctggccgccctttggagaacagactctaggggaacagagaggaaggaagcccttctctttcttactccccgttaggtgcatcctggcagatgcgttccttgggagaacaccatgcagggtgcattcccatcaactgtaagagtttgaaggactagagagacttcatcctaatccgttcttaagtagcaggtccttagaaattcacccaggttttccgttttgtttgttagtgttgttgtttgttttggaggggaggtccacaaagccattttcaatatgtcagtatgtctattggcgacgtcttgccttcctctaatgtggatagctggggagctgggattacatcatgtattgtggtcacactctggatctcatttgatcaaaagttccatttgccactggtgacatcactaagatatcagatggttgatggggtctagaaagtaattaaagggctctgaggacccatgggggtcaacgtcaacccttccatggctctttgatattaagaatcaacttgcagaccaggtgcggtggctcgtgcctgtaatcccagcactttgggaggccaaggtgggcagattgcctgagctcaggagttcaagaccagcctgggcaacatggtaagatcccgtttctactaaaaattcaaaaaattagccaggcatggtgacactcacctgtagtcccagctacttgggtggctgaggcacaataatcgcttgaacccgggaagtggaggttgcagtgagccgagatcacgccatttcactccagcttgggtgacaagagtgagactcttacctccaaaaaaaaagaatcaacttgctggccagtggctcacacctgtaatcctagcacgttggaaggctgaggcaggtggattgcttgagcccaggagttcgacatcagcctagacaacacagggagaccccatctctgcagaaaaaaaaaagaatcaacttgtctgggcttgtatgatccaaccccattggaggggtcagtcccagagacctttcagtctgtggatacaggaaggaaaattggcctccaggaggccagagtagaactggggctgagcccaggcccaccccaaacggctaaatgggcaccgctccatgggctccctggagttgccccttgaacaacttagctctagtatctccatatgtcaaaggtaccagcgcagggccacctccccagactggtttgaaaagtaaaactgcaaaagcaggtggattgcttgagcccaggagttcgagactagcctgggcaatgtggtgaaaccccatctctacaaaaaatagaaaaaagtagccaggtctggtggtgcacgcctgtagtcccagctacttgggaggctgagatgggagaatcacctgagccagggaagtcaaggctgcagtgagccatgatcacaccactggactccagcctgggtgacagagtgagatcctgtcaaaaaaaaaaaaaatctgcaaaaccaaaaattatttcacaagaactttgaacttgtgaaattctttcacaaacaactggtttctttcccctctccagctattctctcacagcatagttcatatataggtgcttcccacagagtaaactctgcctgtgatgttgtcccgttcttccaggtccgtgggctgctggacaccctggtgactgacctgatggtcctggctgatgagctcagccccataaagaatgtcgaggaggctttgcgcctctgcaggtgactctcgggcccaagcaaccttctggaaaacgggttaataaataaatcaataaagaaccttcaagtttctactacttccgtgtgcctctgtgtcttgcatgatggatcttggctaggtcagctcctgatccaggtcctcccatgttccacctgccctcagatcccctcctgccagctgccagagccctcctgcaggaggacagacagacatagctggggaagtgatgtgtgggatgccaagcagaggagcagattggtagcaagacaaggagtcaggtgacaggacagtgtgtcacctctggtagtccctgcctctggcttccttggcccacactttcagggtcgtgcttcctggagccaggtcttcccgaagtgtcatcaccaagtatgacaaagtgtgagatgaggagtagaactagacccatgggacctggctccctgccatctcccctcttcagctgggtcccagggccccaattcagtccctgaagatcatgctcaccacacctcttcagctctagaggccacatcaccttgttatttcggggtctagtctgccttatccccctcctcatctcaaactatctggccttgagccatctttctgccttaaaaacagctgctgatcttcatgctacctcccttgctcaggggaacatgaaacaggctagaaatggctctcagaaaaaaaggtattgtcagctcaaactcaggcccctcattgtcttctgtcagtcataaccatttggggctgggctccctgtgtgaagagcactccaggctcccagagtttgaagaacaactttggtttttgggtgggtgggcatccttaagtgggcctcaggcatcctccagctgagatgcaggagggggaggatggacagaaggatctgactccgtgtgggaaaggcagggagggggctgtgctggagtcctgatgctctcctccccaagaagacgagaagacgggggctccaccaaagagccagccccagggaatgtccctgccctctcctttaatgtcctcccggcccagaggaggaaggggaggggtgtggtgggggtgttggagcccccctcctttcctgttgaagaggcaggggaagggttaactcaaagcagaggggatcaggtcgccagcactggctccagatgtgcacttcctgggggcggccaacaggcaggccccccacctctcaatgcaccacttgcctggccagcaggaaggggttaacctgccctgcacttcctcctgtgtcctgttactgctgaggcagacctgccgggccagctgagcaactttcctcggagtgctgcctggcgctggctaggaggcaaacgcacgcgggaagagctgctacccattccagggaccctgccgctgcccctctgaggggtctgcacctcctgggagcaggtgggtctctgggacgagggtccatggtggatggctctggagacgctcccgaggctgtgccgtcccgctgctgcacaggtcggagggtcaccgcagaggctactcgggctggggctggggccgagggagcccgcactggaggtaagcttcctccctggccccctccctggcagtggcggcatggaaggcgggggttggtggggagcaaacagtggttctggggcttagtctcttttccaggtgcgagggagaaggctgagctgtagaggacctaaaggcttctttcctgccacccctccctccctgccgcccccaaaaagggactcagggccccctccccaaccatcctgggacttagcatctttggtggcatcttagcatctttggtggcattccccacagactccttctgcacatctctgctgtttcctcttcttcagcccctcatgcacacctctagcctcagggcagtcccccctcccccatcttctgtgctcccgggatgcagctattacagtggccagaagcttagagttcaagctcaccccctgtcccttacagcatcaagaagggcactgtcattccccactgctcaggctggatctgacttggaggcaggggctggagcccaccttagcagaggacgggaagagggtgtgggctgggctggtgggtgcacagactttacgcaaactcatgcacgtgtgactggacagatctgggttctctccatctctccgaaacccttgctggggatgagcgatctgcatttttcggtcctgacttttgggaaactctccagatccccccatcctgcaggccctgagaagagcagcccctccctactgcgcagttctccttgggaccctgtatgcaggagagagctgatactccgtgccccgtggcccatcccaccgcctgctggccctgctcccatcccctcagcttcctccctcctctgccctctcgtcatctctgaattctcaggccctgccctctctgtgcccttccctccacctgacagggtctggctcaaggtcactgcagtaattccatacccagctgcccagggctgctgctgctaccgccaccgccttatcggccgctgggtttctgttacactcccttttatttctgggcatatcgtgttcgataaaaccctttgcttgtaacactgctggcagcgctcccagctgctccctcccgcgttcccgcgttccttcctttcctcctcccttctctgcgcttgggcaggcttcttcctttcctcctcccttctctgcgcttgggcaggcttcttcctttcctcctcccttctctgtgcttgggcagcctcaccttgtcccctcaaactccagagaaggaaaatcaaggtgcctccccatgtttctggccccgcccttccccccagcccctgcaggggtgtgcagagaatgcccaccttctgtgagaaaggtccaggcagggccgctgggcccacaccgagagtcccctcccagaggctggtgcccccacacaggccaggccggagggccagggcagccaggtccaggtagggctctggtgcagtcacagtgcccgactggttctgctagttccagcggccagccggtaggggcgtgtgctgggcgggctttggtgcacattatttcccatcttgactctgccacccccagccacgggttggggaggtgaaggcaggtctgagtcactagcaagggggagggcaggagttaaacaagttgtggccgtggcattcccacagaaggcccacgacccgctggaaggaaagagatagcagacaaaaggtaggctgcgctgtgggccaggcactctccacctcgcccactcccacggtatcttattctctgggcccccaacaaaacctgccaaggcatgttttcaaagcgtggggctgctttgaactgagcccagcactggcggggctggggtggaaggagcgtggaatcgggtgcgagaggacagtctccttcagattcctgcttctggcagcctggggaccagttggggcacgggctgggatggagggtggagccgaaaggtgtttggtgggtgggggacagttcacgggtgaagtggaggctctgcaggcccagacagtgtgtgtgtgcatgcacacaccagtgctagtgtgggaggaatggtggtggtcagggaattcctcttttggtttctgaaagggcctttgggaggaccttgggcctggagttgtattcagcagatagcctggacctgtggctactggggggaattgggctggcccagctcttctccctgctggggtaccagaggtccactatgtgtccagcgttttggggctttggagaacccagactgttcctactctcagggagcttccattctagctgagaaggtgggactgagacagtaaagcaatccgatgaaataatgaccaaactgggtaacactgacaataagaattggattagtcttctggagtcctggatggtagtccaggctctgccacttacgtgccatatgatgcaggcaggtcccatcccctctctggcctcaacacttccatgtgtacgtgggggtggcatgcaggagtgttggcagtggccagaactctgaggggcagtcttcctcaaacgatacttgctctcttgccttctggcccaggtcatagcatttcttctgagccgccctcccctgacttgctggttcactcctccttactcttcccttgtgatcttggatctcagctctgtcaccacctcctctaggaagtctcccctgattttcctggcttgggtcttcctgtgcggctctgcactcccacactggactgtgattttctgtaccctctcaactgaacgtgggtggaccaaggcgtgtgttctgtgcctggcatggtgcctggctcagaaaaggcctccgggaaataggtgttgaatgcatcaaactacaaaaattaacaatatgagaaaagtgagctgaggagctaggaaggataggtcttaagctagatctcagcagaaacagaggcagtggccgagcagaagcaaggcaagcgggcattcctggaatcctgttagcgttcccccatgaggccatgcactcttaggtggggcttcctggggtcatcttggttccccatgcagcagctctgtgatctcggacaagtcacttaatattacagggtctcgctctgttgcccagtggcctgaccatggctcactgcagcctccaactactggcctcaagtgatcctcttgccttggcctcctgaagtcctggaattacaggcgtgagccactgcaccgggcccatttaatactctgagccccacctttcccatctgtggatggaggtaatgataatagcatctttggggtgtggctgtgaagatagatagatgagcatgcaaagctccaagtgcctgctgaattgtaagtgaaataagaacgtgtgccgctgaaggctgtccctggaggcagggacactctggccaggcctcatttagttggtcagtggctgagtgacccatgaggtaggcctctgcccctgagttcctggccctctcttcctcagccccatgtggaacccaaggatgcagctgctctgctaacacggcagcccatccttcaagactgtgacctcgccacagtggccctcagccctccacctccggcgggggcgagggccacccacctccaagtctccagccatgacgacctccgcactccggcgccaggtgaagaacatcgtgcacaactactccgaggcagaaatcaaggtgcgcgaggccaccagcaatgacccctggggcccccctagttcgctcatgtccgagatcgctgacctgaccttcaacacagtggccttcaccgaagtcatgggcatgctgtggcggcggctcaatgacagcggcaagaactggcggcacgtgtacaaggctctaacattgctggactacctgctcaagacgggctccgagcgggtggcccaccagtgccgcgagaacctctacaccatccagacactcaaggacttccagtacatcgaccgcgacggcaaggaccagggcgtcaacgtgcgcgagaaggtcaagcaggtgatggccctgctcaaggatgaggagcggctgcggcaggagcgaacccacgccctcaagaccaaggagcgcatggcactggagggcatcggcattggcagtgggcagctgggcttcagccgccgctacggcgaggactacagccgctcccggggctccccgtcctcctacaactgtgagtaagccccggtgtgtggctgggatggggaggtggcccgacttccattcctggctctgcaatccaagccatggttcataatacctacctccgaggggtgttatgaagattcagacataaggaatgtaacacgcaaggcgcaacacccggcacataggaggtgctcaacaagttagctcagataataacgttgttatagattcattatcattcgttagctgcctgataggatggcgcgatagtggaagcatgggtttggagtcagatagcattctatattctgcttcctccaagctgtgtgacctgggcaaccagttctctgaacctcagtttcctcatctgtacagtggggataagctcacctacctccattgtttgatctgagaatgaaatgagaccaggttcaggaacgtcctctaccctgcacccagacacatggcattccccttcatccccctacctgagggcagcggctagacagtccctgactctcctgcccccagtcatgggggcttccaggatctgaggaatactcagaatggcccgccttccataaagcccttgacagtttgctgagggctttgaggttgtgacctcgttggactagaacctcctatccttgcacctcccttgcccccaagccaggacagggtccatctggaagtccaagagctggagtcagggcacctgggttcaagtcctgcttcaggaacctggtcaggggccctaagtgccgcctgtgcatctgctaaggagggactggagccgcccctccatccgggatgggttgggatggggaacttacagagtgcctggcacactgcttggcccacgggggcctcaacggccgttgttcccctcctctcagttctcttgagcctcagcttcctggcaggcagaggggtgtgggagccgatgggtaatcgtgtggtcacagagacatgatggtcattgcagcctcctcttcgtcaccccgctatacctccgacctggagcaggcccggcctcagacgtcaggggaagaggaactgcagctgcagctggccctcgccatgagccgtgaggaggcagagaaggtgaggccatgcagccccactgcggtggggaggggatgggctagggggagagagtgcctgggagccccttggccttgactcaggctctgtcacccaaagccccagtcctgtgcccaaggacagcacaagacccattatctctgtcggtttgtcgcaggcagggactgcctccctgcctccagtcctctccactgggcctggaaagggtggcgagtgtacaattaggggcacatgctatgtcttggggtgcctgctaccacctcatggtggagtgggtgagtgtgctcagacatattcctaggagacactgggatatgcttcccacccccgcccaccagctatccttttggggagacaaggacaggcccccgatatcatcatctttgccattacctctgtggatccaggaagaccaggcaggaagcagctgggcctcacacaggagggcctgaggaactctcagaggattcagaagcgaaagatcagtcttcctgacctttaaactgcatttcagatgcaggcagggagaaggccacgcccaccctgctgactgagcggcaaatggcccatgcacactgagggtgggcattagtgtctccatccccatgacccaggcaggcctatactgcccttctggtcccaaggtgggggtacagggccaagtttacccctctcttcctccgcagcctgtccccccagcctcccacagggacgaggacctgcagctgcagctggctctgcgcctgagccggcaggagcacgagaaggtagtgggccgagcccgctgggctgccggtgctgctgctgctgctggtggaggtgcttcagggcactaacagcctcctcccgctgtacccggtggccctgctgctcctaacctctcagctgcctcccaccctgcactctctcgactccagcctctggtgcacaggtccccggattcccgcctgagctgctcatgctcctaactctttctgtgccttctgcaggaggtgaggtcctggcagggtgatggctcccccatggccaatggtgcaggggccgtggtccaccatcagcgggacagagagcctgagagagaagagagaaaggaggaggagaagctaaaaaccagccaggtagggagtgggctgcggtgcttgggatggacagggcctaagagatggactgagtatttgtaaagagagagcagagcagtgcctggcatatagtaagcactgatgtgtttattcgatgaaataggggtgggggtgtagcagccctagtcccacattgcatgggctggtgactgagttaacagcaaagtgggatgcaaaaggttcctgattggagacccccggattcgggttctggatttgctgccacttactctatgacttggggcatgtcactgtcatggcctcagtttccccttctgcacagtgtgcttattggatagttccagctctgacatgctaggattatgtgatactgtcaatcaagactagggttggcctaagcacatggtgctgaaaacacctcgggctcatggacatattttctccgcatggggagtgggcagctgctgagtgcaaggctgccctccaaagctgtccatgccacgcccgggtgctgtggtctcctttccgtccatgttcactgtggccagtttctcttggacactgacctagggaggtaggctggttgaaaaacatctgcctttggccttcctgcccctttctgctggcctggattctatcccagctctgcctctccctggctgtgtgacttcaggcaaacccattccaccctctgtgcgctggctggctcatccataaaatgggtacatcatctgccctacctacctcacagggttgttatgaaaatcaggtactctgtggatgaagaaacattataaactgtaaagcactgtgcagaggtgagggatcatgaataggtatctgtggaatgaataaagagaatgaactggcattagcctgacaggtcagggcctgccctccctccaggccccgcccacttctgagccgcggctgcctctcccctccacagtcctccatcctggacttggctgacatcttcgtacctgccctggccccgccctccacacactgctctgctgacccatgggacatcccaggtgggcatgcagggctgcaagagacttccaggctggcccaagagcctcctccttcccagccacttgctgggccaagcacctcctcccaaaatctgagtgtcaccgggcaagtcactcaccaccttgagcctccgccgcctgtgggacaggctttcgtagtgagggctatggagaatgtctgaagggcccagctcctaggaaacgcagcaaaatgttctctcgctgcactcacttgctcagcacgcctgggaaggtggcctgagtcgcccacacctgcaggtcccagttcctggggtcacttgtcaaataggggctccagcctgctgggtggtcctgaggctgcaggccatctgtgacatggatcttctgcctcccaacttgggctgggtaactgggaagggccctgggcgagggataagggtgggcctgggatcatgtctatgctgttcccatttcaggttttaggccgaacacagaggccagtggatcctcctgggggccttctgcagacccctggtctccgatcccctcaggaaccgtcctgtcccgaagccagccctgggatctgactcccatgctctcctcctctgagccctggggcaggaccccagtgctgcctgctgggccccccaccacagacccctgggccctgaactctccccaccacaaactccccagcactggggctgacccttggggagcctccctggagacctccgacacacctggtaagaagagggccagagagtgtgagtgaggagctgggggacttccaggcagggccaaggggcagcagatactgtttgtgttaggaggacagcttctctggaaaggggtcagaccaacacctgccctttttgtcaacccatctcctcttcctctctctcttccgaggtggtgcctcgacctttgacccatttgccaaacctccagaatccacagagaccaaggaggggctggagcaggccctgccctctgggaagcccagcagccctgtgggtgagcagggcaaggggatggtgaggctctggggaatgaggggcccaccccgagcagcctctgtcctcttcctcccacgtcgggcgccaatccctttccccaccaattagctctagcatttctattccagagctggacctgtttggagaccccagccccagttccaagcaaaatggcacgaaggagccagatgccctggacctgggcatactaggggaagcactaacccagccaagcaaagaggcccgagcttgccggactcccgagtccttcctgggtccctcagcttcctccttggtcaaccttgactcgttggtcaaggcaccccaggttgcaaagacccggaaccccttcctgacaggtaagatatgcccttgtccctcaacccaggggctcctgctttcagagcctagcctccgccggaggagcccactcttcttcccaacttccacgacctcccggtgtagggctctgaaccccgggtcactcaaagccactctcgttctgcaggtctcagcgctccgtcccccaccaacccgttcggcgcgggcgagccgggcaggccgacgctaaaccagatgcgcaccggctcgccggcgctgggcctggcaggcgggcctgtgggggcgcccctgggctccatgacctacagcgcctctctgcccctcccgctcagcagcgtgccagctggcttgaccctccccgcctcggttagcgtcttcccgcaggccggagccttcgcaccgcagccgctgctgcccacgccgagctcagccgggccgcggcccccgcccccgcagaccggcaccaaccccttcctctgagccccgccccgtcccataccggcctgcgcctgcgccggacgctccgcggccccgcctccggacccggggctgggcggggcgccggtgctagtggaacgccgagccagtggcggctggtatcccgcggcggctctggaagctggacgcggaccacggcccgggagctagaaactgaacgcccgcataataaagactggaaccctcgttctcagctctcaccaagtggactttttgcggggtgtggcggccgggtctcgaccacagcgtggatcaccggctgtttaggaaactgcagctgcacaacgtggggtgcaaaactgccccgcttcctttacagctcttctcaaccctcacctccatcccccgtcacccaggcaccttcgcttccagatgctgccaggctgtcactcaattcggtcatttcattcatttatcacacatgggcactggggttgggctaacagcaagagacaataggcctttgttcctatttattgggtactgcttacgtgctaagcagatcagtttatttaatgcttgcaacgactctctgaggtagaaaatattgttaattccgttcaggatcccggctacataatctgtggggctcaatacaaaataaaaatgtaggggctccttgttcaaaatcgtatgaagaatttcaaaacagggacaacagagcatgaaaccaagcgcaaagcccactgcagtgcgattgcacaggtatctcaccttgcagccggcactactcccatttttcaggcaaggaaaccgtggctcagagaggttgaatggcatgctcaaagtcacaaagctggcatggggcggggctggaactcaagagtcagacagtctggctccaaggcctggagatcccaggctgggccccagatttaattcagcaaatattgactgactgctgtggacaaagtgctgggctcaccttggagggatccaacctccaggagctcgagcgcagcagggtagacaagccaggggcacgtgatgcggctgtggcagaagccaagtgcaggagctcccaggctcctttgttttactgagtcaccttaaatgtaactctgccctctcccttgcttcgccaaggctagcgagaaactcagtcttagccacacaggaggaatcggaccccttctgggggtttatgtggagtctgggaaaccaagggtggggtgaggcctggtactcaatccaggaggggcccctatgaccaccctcgcctgtttttcttctcaatgctccctgatcactggaccactggacactgatgtgtcctcagtgcttggggtctggctctgcaggcagcctgcagccagcctccatccccctttcagggacaaatggccttccaccagagtcggtgagtggagaggcacaatgccactccccttcctgaggtgggggtaggggaagggagtcccacaatgcagttacaaacaggatggacaagaacacctgctcaggagtcagacttacagggttcaaagttctgctccaaggtttgaccctaacaagaatcacttagtaataagtggttatgctctgtgaccttgagtaaattacttaccctctccatgtctctgtgcctgcgtttccttacttgtcaaacgggatcagaagtttcttccttgtgaggttactatgtggatgtccccaggcgtgtccattcagctcagagtccaccctcttcaaagactgaccatgaggcacgaacccatcatggctttcactcctggttttgccaggcaatacccagagtccagcacccatctattaatatcttctgctgcacccaaacctgggatgttccatccttcttggcccctgatccaccctttgtggccctgccacccaggctctcttcttctaaactggatccccccgaggactcccaaggggagctgttttgtttcccacaaaaaaagttggcagccttgcttcctgcctccctccttataagacccctcctgctaggaggttggtgccataagtcattctgtctcttccctgcctggggctgccactccacctcacttttgggatgcttcggtcttggctcatggtcttctcatccagctcttacctcaatttcaagtcgctccattatccaaggaccttatggccccttgacctctcaatgaccctcaccatggtcacacttggaggtttgtcatcaccccagattcctctacattcaaggcaggcttctggctctctgagcttaacctcattccttctagccagaacatgttctttggagcacccactggaccctccggctagccaacccttccaacaacccgccacaccccacattctcagagtcacccaggaccaccatctcttctatccttgatggcgtccaccactttctctcaaacgaatccttcccatcgaaatgtgtcttaattagctccatccatcttgacagtgtcttcccatctatcctctcatgtcaagcacccatcatctctctctgtctcccctccctttcctcttcctcctcagccgactcggcaacttctgctctcagcctgacttcactagaacgacgcccactaagcacaccaatggcctccatgttgctgaagccagtggacatttttctgtcccagccaggctggcccctcaggagtctgacatgtaggcactctgtccttcatctctggggtgctgtcctttgcaccctggctgcttcccttctgtgtctttctttctttctttctttcttctttttttgagacagagtttcgctcttgttgcccaggctggggtgcaatcatgaaatctcggctcaccgcaacctccgcctcccgggttcaagcgattctcctgcctcagcctcccgagtagcaaggattacaggcatgcgccaccatgcccggctaattttgtatttttagtagagatgggggtttctccatgttggtcaggttggtctaaaactcctgacctcaggtgatccaccctcctcggcctcccaaagtgctgggattacaggcgtgagccaccatgccctgcctccatctgtgtctttcacaggcttacttaagcctggacctgagccctcttctctgctcctctgcatggtctccctggatcagctccacacccacatggtctcaacagtcaagacccccaatcctctctcctgaagcctctcctctgtcctccaagcagtgtcatctctgcctccatgtgcacatctcaaacccacaggtcccacaatgaaccccatgagttgtccccccacccccaccccatgccctctcttgagggaacggccccaccttgcaagtcaccctggacaccgccttctttgtcgccgcccatcctgacgacgtttcctccttgaccgacttccagcccatccctttctctgcatctctgctcccccatctccccctgggtgctgctatagcctcctatctgcccctgctttcactcttgcccctttccagttcattctccactgggaagctggtgggatctttccaaaacgcagatctaactggtaaccctcctgactaaagcctttcaatagcttgcttctactgtcatcaaaaatccccttctctggccaggcacggtggctcacacctgtaatcccagcacttcggaggctgaggcagatggatcgcttgaggtcaggagtttgagaccagcctaggcaacatggcgaaaccccgtctctactaaaaatacaaaaattagctgggcatggtggcgcgctcctgtagtcccagctacttggaaggctgaggcacaagaatcgcttaaacctaggaggtggaggttgcagagagccaagatccactgcactccagcctgggcaacagagtgagactctggctaaaaaaaaatggggtcgggtatggtggctcatgcctgtaatcccagcactttgggaggccaaggcagatggatcacctgaggtcaggagttcgagaccagccttgaacccaggatgcggaggttgcagtgagccgagatcacaccactgcactccagcctgggtgacagagcgagactctgtctcaaaaaataaaaatccccttcttacagttcacgagtgtctccaagatcttgcctctgccctcatctactgcctgtcttccctctttctgcagttgctcagcccggactcactgacaagccacgggacctttgcacaaactgtacctctgcctccttccccagcactccccctgagcaccctccaagttcctttctctcgttctccatggcttcacaaatgtgatttcctcagggaagccttcatcctttgccccttccaccagatcaggtcacttgttacgttataccctcacggacttgtcacgtgggtgtttatcggtatggctgtcgaattagcatctgccgctctcaacagactgtgagccatgtgagggcaggagccttgtttctctctgcccaccattgtatactcagtgccttgcagagtggcaggcggcaggcacttaataaatattggctgaatgtagccaatgaggccatgtgtaacctatgagacataaaatgggctcatcagtattatttaaggaagacttcctggagtgggtaggatttgagtaggacctagagacgaggaggctgcaaaaagcaaaccttgttagctggtggacctggccaaggtacgccttcgccttggatctcatttctcatttgtaaaatgggcaggggttggacaaaatgagctgaagctctggcatcccatgtccctagcatctcccagccctagatcccacaactctccctattcccttgagaagggctgtcctccccaggcaggggcagagcccagttttatgcacagaatgggtcctcccaaggctcgggtgcctgatctgcaattctgcgctccgccgcagggcgacgctcggagaccagccacactgtcccaagtcccggcgaagacccgcccgcggctccgtaggtgcccggcccgcccctcgcagcctcctgacttcccttcctgtcctcagcggccgggcccacggccccgagcagccatgctgggcgcgcgggcctggttgggccgcgtccttctgctgccccgcgccggtgcaggcctcgccgcgagccgcaggtacgggcgggcgagcgggcccctagggcactccctgcgcctgcctgcgggcccagtggagggtcttccggacaccggtccccagtgccagtctggaccacccctgcatgcctggcccttcccccaccccacctccggtctgctcctgagacctggctctggctgtaaggccctcctcccctcctctcccgtcctcatcccttccctcctctccccttccttccagtgcagtgccagctcctcagggactgttctgacactgcttccaggaagccttccttgcaccccagtgctggatgctgggtcaagggcctttctccaatagtaccctgtgccctgtcacagtcctttattgctgcatggacctttcgttatttaggtctgcctgcagtcccacttccaggctgaactccctgaggtctctgattccctaggtgtcctggagtctggcccaggacctggccccacaggagtcccagcaggtgggcgctgagtgagggagtccccatgtctggtttcctctgtttgtccctcacctggtcgagtcccagaccctactgatcttggcctgtccagccaccaacagtaggctgccttccagtggggccacacccaggcctgccagagagatgcctccaagcagctgctccaggaagggccgggggaggggcctggggaggggtaagaatggagccccaagaaccattctgcccattgtgacccgccctgacctcacagccatccttcccaccgccaggcccaggaggttgggggagactaacctggcaaggagcccccaatgagccacctctcctcaccccccaaaaaacataagggggagcacaaaggccacagtctcccccatggttcagaaaggtgggttgggctgggagcaggggtcctactggggtgctgagtgaaatggagcaggtgctggggggcctgggagaaggtgggtggaggcccctggcttgcctgatgcaccagtcctcgccaggggtagctcctcccgggacaaggaccgaagtgcgacggtcagtagttcagtgcccatgcctgctggagggaaaggaagccatccttcatctacaccccagagggtccccaaccgcctgatccacgagaagtcaccatacctcctacaacatgcctacaatcctgtggactggtgagcacctctcctggggccctgcctggaatcgctggggtcctgggcccctcccagaccccctgggctactgagtgatgccccaccctgctgggtctaggtacccctggggacaggaagccttcgacaaggccaggaaggaaaacaagccgattttcctctcaggtaatgctcccaccttccctgatgtgggggtgtgggcagggagtggcagtggatgggggagggtcctctcggcctggcgggtcttccaggagactagaggccaggacgtcttccatgtagccagggccacttggccagcctccctctgacccgttgctggccccctgacctctccccatggccctgttcagtcgggtactccacctgccactggtgccacatgatggaagaggagtccttccagaatgaggagattggccgcctgctcagtgaggactttgtgagtgtgaaggtagaccgtgaggagcggcctgacgtggacaaggtgtacatgacgttcgtgcaggtgagcagccctcctcgggagtgtatgcgccacatgggctcagagcagctcccctcaccctcgccctctctccgccaggccaccagcagcggcgggggctggcccatgaatgtgtggctgactcccaacctccagccctttgtcgggggcacctatttccctcctgaggatggcttgacccgagtcggcttccgcacagtgttgctgagaatacgagaacaggtgggtgtgcctccgggagttgggggaccagggtgggggactaggaaacaagagcccctccccctagctgacctccaggtgtgcccccacctcccgcagtggaaacagaacaagaacaccctgctagaaaatagccagcgtgtcaccactgccctgctggcccgatcagagatcagcgtgggtgaccgccagctgccgccctctgccgccaccgtgaacaatcgctgcttccagcagctggatgagggctatgatgaggaatacggtggcttcgctgaggcccccaagtttcccacgccgggtcagtgccccacgcccgccttagcccaggctttggccttctgattcctatgctggtcagggacctactggctcctggcctcacccatagcttcctgtcctcctgactggcagtgacctccttgcccctagcctgtcggtagctatcggtgaagacccgactgctggtgtcagcagtgaccctctcaccttaacctagatgatgaccttctgtcccctgacttggtcagtgacccagtgaccctgacttggctaatgacattctgggctctagggggacaagtaacttactggtcctctgtgaaccaatgatattctgacctctggcttaggctattaccttctgtcctgtgggttgactcttgacctcacagcctgtccagagactgcctgttgagtgaactcccagcctctgcctggcccaaggcctcctgaccaccccgatctctgtccccactttcccattctctcacctgcatgttcttggtgcccccacagtgatcctgagcttcctgttctcctactggctcagccatcgactgactcaggatggctctcgggcccagcagatggccttgcataccctgaaaatgatggctaacgggggcatccgggaccatgtggggcaggtgacgggcactgggtgttccctggaggggcagcagggggctgtggggtggggcagaagctgggactggcctccagctttgtatccgcacagggctttcaccgctactccacagaccgccagtggcacgtccctcactttgagaagatgctctatgaccaggcacagctcgctgtggcctattcgcaggccttccaggtgacccctgaccccagcccagagaacaggcatctcactctggctgcccctcccaaggccttcctggtgactgtggcttctcttaatctgaatcccctgttccctcccatgtacccactacccaggcttccctcccccgcctgcctcagagaatgttgccaccttccacctgggcctccccagtgacctctctgttcacagtctcctttcttccctttcttagctctctggtgatgaattctactctgacgtggccaaaggcatcctgcagtacgtggctcggagcctgagccaccgggtgtgtgtccatggtggcaggcaggcctggctgtgggaggggttggggcctccactgccctgtgggccggggccagccaactctcccctccccacagtccggaggcttctatagcgcagaagatgcagactcgcccccagagcggggccagcggcccaaagagggcgcctactatgtgtggacggtcaaagaggttcagcagctcctcccggagcctgtgttgggtgccaccgagccgctgacctcaggccagctcctcatgaagcactacggcctcacagaggctggtaacatcagccccagtcaggtgaggacttctggggtcacctgacgggccctggtgcctgccaggcgtgtgagctcgcagacaaaggccattctcctcaggaccccaagggggagctgcagggccagaatgtgctgaccgtccggtactcgctggagctgactgctgcccgctttggcttggatgtggaggccgtgcggaccttgctcaattcagggctggagaagctcttccaggcccggaagcatcggcccaagccgcacctggacagcaagatgctggctgcctggaatggtggggcagcacacctgagaccgagcctgtctgtaggatcccccttcacaaagcccctgtctttccggcagcggctaaatgctcactctcccttgattagcgttattattctcagttgacaaaagaggcttaaggagcttgagtaacccgcccaaggtcacgcgcaagggctgggaaccccgccatgtctggctttggagcccaagatcttagggatcacccatggctccagggaggtgttggggcctaaggtgatagggtggacatgcctggagggtcctggccagcttcttaccactacttgtctctcctggctccaggcttgatggtgtcaggctatgctgtgactggggctgtcctgggccaagacaggctgatcaactatgccaccaatggtgccaagttcctgaagcggcacatgtttgatgtggccagtggccgcctgatgcggacctgctacaccggccctggggggactgtggagcacaggttgggggctgggtagaccgggagggcccgtctccccaacgcgtccccagcctacctctgccctacttctcccctccatgtggactccagtcctggctctgccaggtgcttgctgtgagtttgtagcttccctgggcccatttactcatctgggaagtgggctgatggcacctgcccaagagggttcatctggagggttaagtgaacaaatgcgtgaaagggcctcctctgggaaaggccctctctcctggggctctccccagcccctcccgtaatgcctgtcccccagcaacccaccctgctggggcttcctggaggactacgccttcgtggtgcggggcctgctggacctgtatgaggcctcacaggagagtgcgtggctcgagtgggctctgcggctgcaggacacacaggacaagctcttttgggactcccagggtggcggctacttctgcagtgaggctgagctgggggctggcctgcccctgcgtctgaaggacggtcagtgggggtgcagggctagtctggggtcctgggaggtgtaagtgcagcgtgggtgaagagctggtgtgggcaggagccctcctggctttgtgtctctgctacttattaatggcgtgatttttggctgctgtaatatttctgtgtctcaatttcttttttttaaatagagacagagtcttgctatgttgcccaggctgatcttgaaatcctgggctcaagtgatcctcccacctcggcctcccaaagtgctgggattacaggcatgaaccactacactcagcgtgttttgtttcgttcctttcttttctttttatttcctttctctttctttctttctctttcctttcttcctttctttcttttctttctctctttctttctcttttttttttttttttgagacagggtctcactgtcacccaggctggaatgcagtggcatgatcttggctcacagcaacctctgcctccggggctgaatcaattctcccacctcagcctcctgagtagctaggactataggcatgcaccaccatgcctggctaattttttgtagagatgggatttctccatgttgcccaggctggtctgaaactactgggctcaagtgatctgcccacctcggcctcccaaagtgctgggattacaggcgagagccaccatgcctggcctgtttcttaataagtaaaatggagctaacattggtactaccttacagggttgatgtaaagatgaatgtagctgttctgtaaacatgcttagcacagtaactgacacccatggattcagatattgaccaaggctcacttggtctctgccctcatgaagcttacagtatggtaggggagacagcgaaaatgcagtaatgatgcaaaaacacatgcacaaatgtgcagttaaaattgtggtgagtgccatgaagaagtaggacgctctatgtgtgcctgctccctatcacccatgtgccttgtctgtggttaaaggtttctttcccaaaactcaaattttagctcctcaaagatcaggactttctgccactgttgtatccccagggtctagtgtggttctggcacattgtaagtgcttaataaatgttaactgagtgaatgaaagggccttgggagagaaccacagaggaggaccaactcagcctagggagagattagaggacacctgtgacaggtgtcatttaaccaaggcctggagggaaagaggggccatgtggccatggagaagctgtggagagagttcaggcatagggagcagtgcatgacaggcctggtgcaggcagcctgtatcctggaggacaggcagggcccgcgtgttccaggagggcaccgaggagaatgctgaggccggcagggcacggaagccgtcttttttttttttttttcctaagaaaagaaggctggtctcaaactcctgggctcaggtgatcctcccgcctcggcttcccaggtgctgggactacaggtgtgagccaccatgcccggctggcaaggaggttttaagtggattgtgatctgctctggtatggttttaaggaggtcactctgaccactgatggagagaagtgggggtgggggaaacaggcgaccagttaggaggccattactcgtgttcagtccaggcaggcattggtgaaggctcagaggatgtggaagtatgagatggggagacatggtgagatttggatctcttctggccacagccctggcaagactcacagatggattagaagcggagggagagggagaggaaggggacaggatgatgccgctctagcttgagcagctgagtggctggacagaggcatcagcagcgaggagggagcctggagaccaacagttgaggctaggacaggtagagtggagggtgccataaaaaagacagcaaagtactgataactgctggagtggcatccacacccagagcggggaaggggcaggatgggcagggccttttctctgtcccgtcccccaagtggccctggatacagtcctgggcagggtcctgggactcagtgacctgcccttacccccaccccctgcctccctatgtgctgtagaccaggatggagcagagcccagcgccaattccgtgtcagcccacaacctgctccggctgcatggcttcacgggccacaaggactggatggacaagtgtgtgtgcctattgaccgccttttccgagcgcatgcgtcgtgtcccggtggcgttgcccgagatggtccgcgccctctcagcccagcagcagaccctcaagcaggtggggggtgagggcatctgggctgggacctcgggtaggagggaagttggggctgcgatggcagatgggaacagggggtggggttcctgggctgtccccagagctcaggtctgtgtgtgtgcaggcacgtggcctgtcagacagggaggcagaagttaatatgagtccgtggtggctgatgaagtgtttctctgtacgtcttggtgtcagtgtaattgcttctgtccatactgtgttactggtgtgtgtgtacttccgggtgtgtgtgaccctggaggtgtgtgtctgtgcacctacctttgagggggatgctggtgtgagtgtttgtctgtctgcatgtggatgccccatctgcaggtttgcctctgtgtctgcctgcatgcgtgtgtgtctggtgtttgtgtgtgtggtatctgcctctgtgtgggcatctactgtgtgtgtgtgtgtgtgtgtgtgtgtgtgtgtgtgtgtgtgtgactactctgtgtctgtctgaatgggtctctgtgtgctctgggtcttctgggtgtgtgtctccccatgtttgtatctgtaccattgtgtatatgtatgacatttccacttcggtattctcatgtgtgagtgtgtgtgtgtgttcccacttgccaagcattaactcatcctggcagctgagatgagtccctgttccttcttagagatatacggtggggcggaaggaggatggggaagccctggtggtctagggctcagccctccctcccctgacacaccggagtgacctttctattccggtcagatcgtgatctgtggagaccgtcaggccaaggacaccaaggccctggtgcagtgcgtccactctgtctacattcctaacaaggtacccatccctgtgagcccaatctgccacctccccagagctgccccctcccatcctcagctcctcaacatctccttcccctcagaatgttgggaagagggaacttcccagtgggcctttctaatgggcaggtgaccccaccccggcaggtgactctccctgctctgctgctgccctaggtgctgattctggctgatggggacccctcgagcttcctgtcccgccagctgcctttcctgagtaccctccgacggttggaagaccaggccactgcatatgtgtgtgagaatcaagcctgctcagtgcccatcactgatccctgcgaattacgaaaactactacatccatgactgccccaacccccttggggtggggcagaaggtgaagcatcccaactgactagagactcaggccctgcagggccctatagaacctgtggccatccctgagcaccctgccaccaggtgacctcggccatactcactgccccccttgggcacccactcaccctagaataaacttaacagtgtcccgtggtaacctgagggcctcagctttgcttatgagggagggactgggaaccagcagctcagggccacttcctctggcagcccccacctgacccctctgccttctcccatttctccttcatcttccaggggtcagcagactgcccctttcccttccatggtcattgtagcctgaatgaatttagtcccctgaactgaggtcaggggactaaaaccaagtaaagatgcccaggggtgggcatgggggtgtggactggcccaggagggagaaagcacaatccttgccctcagaaagaggttaagaagggaacctgccctcccctccccattgtctccttgtgttgagctggaaagggggcagagatgctttatatgagcttttatatttcacagaatggtgactttgcatatgccctggtgcattgtgggagctgctattgtcacgactaagacatttcttttggggtatccatctagccccagcctcgaaaggatggaagcagggcctccttgcaggaggtcatgttgtccatttgtctgctttcatacaagctggtccaaagaaagagttctctttcgtttggaacatctgttgggttggaagtccttccccaaatctatctgagtccttcttgctgcagagaaagccttcctgtgacctcatcctttcccctaaatgttgggaaatgctcctgagtcctgtccttgacacatacatcttccttgggttgagggatggggactgggacacatgctttgggaagggcaggtgcagagtgatggggctgacggggtgggggaagcagggggaggagctgtccctctgaggcctttgggaatcggctgtgccaggcatcctcagccctccagctaagcaacacagagagccaaaagaggctactagagacaagaaggccttcatggggccactgcttgtgggggatgtcagcagtggggaggagtgaagcaggaaggaaccgggagactggatggaattgctcccttcacacggtcacacatagccacacatggtcactgggaccagagtcagctctgtctgggcagccaggccctcagtgcaagccaccagcccatctggaggggattagtgctccggccaacaaggtcagctggccccttcctagctggagcctactcaaccttgccaggaagtcagagagctggacaagtggagcccagcctggggaggtggaagagagggaggatggagcatggtgaagcacaggtggcctttttggcagccccagccctggctttggaacagtctgggcagtgtgccaacccctcttgccactgtcgtcccattgaccctcatgaatgagttgcgaaggcagttaccttcagcctcctatggataaatattcgaggcccagagagggtaagagacctgcctgcgacccctcagcacttctgtttctctctggggtcttgagggtacaataaagacccctaaggcttcctcttctcgcaggaggtccaggcgcagctgtgggggagggtgcccttggtgtcttctgtccctgcagccagtctgctttctactcggcagctcctctctccctcctgggatgagatgtgcacgcgatgatgggattctgtaaatgggttgggaagaaggagttacctccttaaagggttagttctcccaggagtgctcgaatttctaaagggggcagggtcccacataaatctcactcagaagcaggattataagagttcctgcagcatcccttcccctttgctggtccctcttgagtgtgcaccctgttctaccagcggaacacctgcgggccagggtcactggagacagggccataccgtctgggcagtcacttaagtaacttcatcattctgagcaccccccttccttatctgaaaggtggggggccatccacccagctctcagggctgttaaggtgactaaatgggataatggttgtatcatccctgagcaaagggtatcacagatgggaagattatcttagctccgcagggagccagatgggctgtgagggaggggtaaaggcagggctggagggggctggaggggctggctgagcagggtatatatggggggggttcttcctcaaacccagaaaaactcttagttaggcttagtgtctttgttgagaaactgaggcccaaagaaaggaatttcttgtccctttgtttccctttccctgcctgaggtcattcattcacctaacaactttgtgcccgacactagacaaggccctagtgagcaaaatgaacatagcccctctgggaacacagagcctagatagggagatgatcatttcattactgcaaacacaaacatataatcccagcctgggctaagtgctgtgaagttccagacttgtgtctggctcggtgctgtatcctaagcaccttggcacttaagtggcattgaaatacttgctggaaagaaggccactctgaggaggtgatgtcagagctgaggcttggagggctggagttaaataaagatggtttcaggtcttctttgccttccctgtaggttctgcctctgcctcctctctggcactcaggctaagggtaagcatctccgactggccatcagccccaacatgccgagtacagggatcagatcctgtcttgcgtggccggtctcccctaggtcctgaacccagggaagtgcatgtggatctcaatttatctagatggtgcgtttgtgcctgccctcctttcgggcatgttctagaacagagttcagtccagagcccaggggtggccgggatgatggatgagggtgtggggcctgctgaccaccaggggacctgatcattgggctgggccagcctctctgtcctcattttcccctctgcaaagaaggggtgttgggcgtccctacttctcgcgccagccccggggcctctatcctggcgggaagggcaggccgacccggcagactgcggcctctcgggagggaagaaggtgtcagacgcgcggagcaaccataaatagcccccctttcccagaagacggcacggggttcaagactcaggcgccgcatactcagaatgagagcagagactcccgccaggaaaaaaaggcacttaggggatctgctcattagcatgaaatgcaaatgagcccgcccggcctcatttacacaactctgtgcatggattcggcgaaagggcaaccagggagacgacggcgcagcagccactctgccacttcccccatcccctccccccatcggccggggcgggaactgagacgaccccaaccctctgcggtggcgggaggtgcgcgggggctgcgtgggtggtgcagccttaggagagtgaacaacgcccaggggtgatggcctcagcaaagtgaggggtggtgatggaggtcatccgacccatcccgccgcctctccgcagtggcgcaagcgccccaaaatctccggagagggaactgactgacccactaggttccgccgtgtctacctctcgcagatgttggggaagtgcttcccggcgtctaatcctcgctgttcccccctccaccggcgcccagcacacccgcggcgctccgctcccgggtacccacagctttctggagtggcgccggcggcaggagagagctagagccgactgagccccagaactcggggaggtaggcggggcaagggccggggtctgcgcgtgcgtgtgcacgcgtggaaagcacaaacccacgagggcccgctgccggtagggttaaggtgagtgagtgaaggcggcagacccgcgaagttccagttccgcggacactctttccctaagccacatagggacttaagagaaactgaggcacgaagttggggggtggcggtggtggggactttgaaggtcgagtcgataaagcccagctctgtgcttccgccccctcccacacactcgagacccccacaggttccttcttaggggtcctcgctctgctccgcagcccctcctggggatccgggctctgcggtccagcgcgacctgcctggggccacgtgttcaagcacgaagcccctgcgtggagtccacgcccttcaaaaggtccctaggggcaaagggatgaagcccaggagcgtcaatgtgaggtcaggtccagcgggttagggttacgaggtcagggtcgaagtctcagaattgactcgggagtatgaccaataagcccaagagatttgtggaggccacgcccagaccatgcctaccctagcctttctcgagctccgcccgtttctccaagactgggcccctccagcctgaagccccacccccaggacatccagctccgctccttccctcccccagtcccgcagccaagctcaactccagggtgggagattaaccaggtggagacctgggatttcgctctgggaccccctggtgacaaccctcacccccgtgccgcctgtctcctttcttccccaggcccgcccagagctgagctccgtcctccggctgctgcccaaatcaggggtcgtggacaaaggatgcctggggcctgcggccctacgccaggaccccgcgccgaatactctgattcttcgggctccctccaagggagtcccaaagaccccaatggccaataggaaagtgggttcggtctgggcagcagtctgattggctccagccttcgggagcggacccaggggcaaggggaggggagaggggcggtcctgggttttggggtgggaatcggattccagctgtggttctctccctgcgctcccgcccgcactgccacggcggacggccaatgggcgcgcggctcggggccggcggcgtccggcgattggctgcggggctgtctgggggcggggccgaggcttgaagttgaagtgagggatccagctgtggtgtgcgcggggctcctcgccgccgctttcgctcgctcgctccgcgtctcggccggaggaggaggctgtggcgccggcgacagctacggcagcggcagccaccgcggcggctgcggcggcggcatctccgcctccactcccgcccgggactgccccccactgtctccccgcccctcccggacagtgagcccgcggcggggcgggggaaggagccgcccccaccccctccaagcccacccctaaagagatccctcctcccctcccccgccgcctggcgcggagccgggacgatgctgaccccttagatccggctccagctgcgccgcgggaagagggggcgcccctccccggacccccgccctccgccgctgccccccttttcgttcgccctctcggggcggcttcgccgaaggtagcgccgaatccggcaaccggagcctgggcgcgaagcgaagaagccggaacaaagtgagggggagccggccggctggcccgggaagccccaggggcgcaggggaagcgggactcgcgccgggcggggtttccctgcgccccggcgccccgcgggcagcatgcccctgcgggcagggggagctgggctgaactggccctcccgggggctcagcttgcgccctagagcccaccagatgtgcccccgccggggcccccgggttgcgtgaggacacctcctctgaggggcgccgcttgcccctctccggatcgcccggggccccggctggccagaggatggacgaggaggaggatggagcgggcgccgaggagtcgggacagccccggagcttcatgcggctcaacgacctgtcgggggccgggggccggccggggccggggtcagcagaaaaggacccgggcagcgcggactccgaggcggaggggctgccgtacccggcgctggccccggtggttttcttctacttgagccaggacagccgcccgcggagctggtgtctccgcacggtctgtaacccatatccttcggggcacgacggccaggcgcggggtcagaagggggacgggccgcaccgccgggggtcgggggggaagaagacccaccgccaggtgagtcgaagtgagcccggagggtaggcggatggggggggggctgccagggaggggagggggcaccagagtgggagcggagacgcgagcaggtctcgtcggtaacccgggcttaccccacctgcgtacacacacctcagtcttcctgggttgggggggtggggatccaggccaggagaagagagctgtgccccgctggctcgcagctggacgccctccagatgtggtcaggggagggtcgtcatcctccagatgtgggaagcttcgggagcctgggagctgtactctgcccgcgccggttagcgagctgggtttggtttccgagtttggtggggggtgggtgggggcggtggggaggaagctgcggggacggaggaggggggaccgcaatctcctgggtttccctccttcccccgccccaaagtttgcggcggattctagggtctgatcccccaacctggtccttgaggctgaggtttttactgacctagaaggagatgttggggggcggggaccaggtcctggcccacctcaccccccacctcgcgggttggaggcacaacaaggagattccggcggcggctgatgtcaggggcgcagaatgagaacaagatgtggtggaggggagctgtctgcccccggagctgggagtggagcccctttccgctagagcccagtgccgcgggtgcctcctacccgatctccattcgatgcagggtgcttaagattgggttggggagttttatgctggatttttcttgtggagggaaagactgtgtcaagagcttttttagcaagtgggggatggggttaagctggtccaggttactcctcccctttcacaaataaagagtgctcctgcagaccaggtatgggggactgcaggcccgcgaaagtcttgaggggacagtaatactgtcagtgtgttcactaaggaggactcgggtccaccaccccagcgtagactccgcagataggtttggggaatgcaagccccacattccagggagatggatttagcactgctccctgtctgcccaggctggagtggtaggggagaccccagcccagtcagaccctagctcaaagcgccacttgacagacgcctggccccaagctccctggcgggtcctgccaccgggggaaggaaaggtggaggggaggtgttgctgccatctcaggtctggacagcttctctgggctccttccttccagctcagaggttcttatagacccagggtgggagaccccaggtctcccttgtagcccctgtgagcctagcagggactctgctttggggaaggggggtggaaggttggtgccgccctcactctctgcagctctgctgcctctagtgcgcaaagcagggatgagcttgtggcccccccacccccatcctctacaccttgtgggtctttaggaagctcccctcatcacatcctcttctcatccactgccccttcttcctttctctctgagctgcagaaagagaggtgcaggcctcagaggtctgtgttcttgctgaataggcacaatcttgaggtttgagcccccagccccaggcccctttctcccaggcagggatggagatggagaactgatatggctggaaaggatgggttccgagcaactctcctctctgcccctaatcatttaccccttccacgaatgggaaaaagcatcaacctctatgtcctccttctcaagggtcccaggggaggtagagagagctcttctctcccctctccctgaaaacagacctctaggctagcatctcttctcgcctgccctatctccaggtgctagtggagggtctggaggcagactccttcactgagtggtctggacgggggcaagtgttgaggcctggcatgggggaggagaggtgggaggacagcactcaccttgggagttggggagcagcttcccccaggggagtggtagttgggtgtgtggcatcagcattactaggtctggagaagcctgggttggctgaggatgggttgagaacaattttttggcaggggactgcctaagctgtgcccctcaccactgccatcctacccaagtaccaagagacacctgtatttttgctgccagaggggctctgaactgcctccagggcctccctctttctctttgtggtatctgtgactccccacaggcttcaggagggtccctgtacgcctctgagccggagggacataaggacactcccctccacccccaactaactgaagctagttaggcttttcttggtacattctgcttcttggcctctcctttttaagggaccaggtttcctagagaggagatctagacccaggtaggaagtgtgtgtgtgtgtgtgtgtgtgtgtgtgtgtgtgtgttgcaagggaggacagcaaaaggctcagaagtgcaagctttggtgtggagagcaggggtactggcagacagtcacccctgcctcagatcagaggggagcatgctggcctttccagtatgtgttcctgcaagtgtgagggagcgcgctcccctctcggggaggagttcctccgcattccctctctggctgttgtgtcacatctggaagtttgtgtaggagtttctccaagctcagagcccagcacagctttttctcatttggaaatcacaggctggcatttgggatgccgagagagggggagtgggaggggggccagagggggagaggggagcctgccaggagtcgggggaggagaggggggggaggcctgaacggcaggagccctaatggcttccagaagtgagtgtgagtgagtgactgtgcgtcactctgtgtgtctgagtgtgtccctctagaggggtgggggcacaggagtttctggagccttccttgccacactgtcccaatgccccaagtctgcctatttctcttacctagggagaattctccatttctgtcctcagaggaaatggtggggggagtgttcttcctgtctcttcatcaattccctcctccaatttaatttccaaaccctaagctcaccagaggagattctggggagaagggctggggctggagaattgaatgggattgagggggggccagatcaccccttggcatgctttctgccccaggcccactttccttctgggtcacacacacattccttcccacccgctctgctccaccgctctgctgggggactccccatcacccgtagtgccagttggagccattcctgggattacccccaccacacagccccccccaccctcgcctgctcccgcccagcactcaccccgccctgcctgcctcagccaggatggcgacagacacaactgctcacacgcagacatgcgcacgcgcgcgcacacacacacgcgcacacacacacacagagtcacagacgtttgaatcagatttctggcctatttccccttccaaagattccagcgggccgtctctcttgtgtctctgtgtctcatgtctctgtctctgggtggagccggctgcctttctgtgagcttcagttttcaattcagctggaagcctctctccccctacacccacgcactgaagcgtggtgaggggggaaccacagggaaataggcttgtggggtggggcggggggttctgctgggggaatccccctttgagctttggagcagggcggagcccctacatcccatgttaccctaggggttgccgaatccgatagacaccaggagcctctctgtgggatgggtgaggcaaggacctatccccctacctcctcatttactagaaggccaggactcctgggtccaggcccattttctcctcaacgttccttagtctcacatttccaggctcctaggtgggaatggggccgctggagggcctgcttgccttctcagcccatgcccagagcccctgtgcccctagaggtgtcccagccacccccctcctctccctactttcctcacccttgcggctgccaggctaagcaagggctctatctagataaagccccacacagaggactcatttgtggagataacatgctctagttctctctcccaggagggaggaaaggaggagggatggaagtggggttcctctctctgccgtttcctttttctctgcttttgatggtgggttgtggggagaagaaagatcctcccctctcctaccccctctttgggatccactccagcccggacagtcaccatagcaacagtagacatgtgactgcacaggtctctcatagtcactatggcaaccagtgtcccccgttcccttggttaccatggggatctgtcacatggttttcccccaacctgataacctgtgggtctccctgattctcctcccctgcataaggacaagacaacagcctcagtcaggggagatcatgtgagaggggtctttttaattaccatgacaacaaatccacaccacctggtgacacatcctcctgtcgttatggcaacagaagaacatcacacagtgacatactgccatgttcccaaggaaacaagccctactctgagaagggtgaaagaccccccccccatcaattattcctctattcagagtgtcccaaattgtcgtgtgccttggtctcttccctgtccgtttatgcttacgtgtcgtggaaggagagctgtacagggtgggcaggatgttacttggaagtaggctgaattgccaagggacccttaagaaggggctgacatgatcaagagctgtgcatgaggttattcgggggcaggctttgcctgtaagaggcctccagtctgagcctgggtaaggtggggacagaaagaggggcaactcctctgtgaggtcacttctgtaccttcccccagttataagcagttcacctctgtcaagggaaacaaggcaggaagacctgaatggggacacacatctggcttctaggcagggagacttattgattggttgattcgttcattcattcattcagtcttcccaggtattgatcatctgctccgtgccaggcactacagcaagctccgtaggggatctaaagacgtatcagaatgcccctgcctgtcaggagccccagctcagcaggggaggtcgacaagtgcacagattactaacacggtggaactctgccattagaggggtccaagcagatgtcctgggagcccctcttcctcagagatctactgcctccacacagagacattcactcactggggctccttccagacccccctttccctgcagaggagaggaggggacctgcatggggaaagcagaccagttcttgagggtaactgtgtctttccctttccaaatgatggctcccttcctgtccccctttttccagggtgacccctggctgacccccattctggggagagatccactgcactccggctctactcagaaaaacaattccgtggaaacagagcactttttatttcctccctgtcatctgcctacccccaaaaacctagaacttttttcttaaaccctcttattcttgtgagggggtgggggttagggaaactgcagtgcattaggactctcggggtaccacggacaggtggcgagcaggcatgtgagtctaggggagaagggcctgggtggtggagaagagacaggggagggctgtcaggggtttgagggattcatgggctatgggggagggcatgtggcttgggagtcagaacagagatgggctatggctgggaccagctgggaggaaggtccataggttcctgaacattcctgctggcctcttcatgcctggccaaagccttctcattccagaagcaagattccacctgctctgggccctacagagtctggcttggtgggtcatgccaggagctgccacaatacctcccccatccccattccccagggggtctctggtctcctttccccaatctcctgctctctgatcttttctagcctctttactcttccccacccttctcatattttccttaaagaaaataggatacttggtcatttaaccgtgagtccagtgcctggaaccttctaaggtccggaggccgttttgtacattctcctgctgatgggctggaaatgagtcaccccatagaatccactgtatggaaagacccagggtttagaaagaacccctctctcctgcttgctgttttggctggtctgggctggaagccacaagcaggtgtgatggcggcaatggcctcttgggggagggggtagacattgtccactctgcacggcttgggagctatgcccagcatggtgcctgacacataatgggtcctcaatatttaaatgtgtgaatatgcctagtggtcatttgagggtgttgagaggttgggaggctggtggtggaagagggagccccgggctctggtgctgtagcagcggggactgcagctgtggacgtctgccttacacctagtgccagggcggtcatgacaggcagttctgcctgcctgagcagctatggtgtgcagaggaaactatcatagatcaggagcttggaaaccaccgtctcatcctgccttctcgggtgaccttcagcacatgacttcggcatttctgggcctcaacttcctcgagttctggggaagaaaatgatctaccccagatatttcacagggctgttgtgagcatcaactgtggcattgtgtgaaagtgcttggtaaactgtaaggcaggcataatccgactttaggtttgtataacacattcacatacagtatctcatttgcttctcacatctaccctgtgaggtagggagaataggattcagattctgcagcaaactcatggtgtctggcatttccacaggcatgatcgatttattccccaaatggcttgtgcaaatagtcagggtatttgtggcttgtcttcctttacagatgaggaagctgggtccagagaggtgagatgaccaaggtgggactccccttctctgatgaggagtctggggctgggggctggtctgcgtgtatgtcagggccctggcaccacacctgcttagcctcagatggagccaggaggtaaacgaggaggaggtgttagggcggggtcggggggccggcctcagctccagccttggccagctgtttccttgactgccagtacctggtttgagcgcatcagcatgttggtcatccttctcaactgcgtgaccctgggcatgttccggccatgcgaggacatcgcctgtgactcccagcgctgccggatcctgcaggtgagtgtgtgtgtgtgtgtgtgtgtgtgtgtgttgtgtgtgttgggggttggcccctcttaatcttaataccctctactcctctgcaagaggccctgacccaactggtggggactagggtgggactagagggtattccctcacccacgtctcagtttcagccacctcttgtccccacatcaggcctttgatgacttcatctttgccttctttgccgtggagatggtggtgaagatggtggccttgggcatctttgggaaaaagtgttacctgggagacacttggaaccggcttgactttttcatcgtcatcgcagggtgaggacctgggctggggtgggagagcaatggatcagatcggtcccttccccggggccagggttctgggcctgtgacctctcagctccagcccagttacagcaccactttctccctggctatctcctgagggtctgaggctgccctgcctctagcactgtagcctatattctaaattccaaggccctattcctaattctgcccccttctctgatgggcaatctgtccttgtctcggggtagccttgccccccagacagagagccggatcttcagggtcccttggtgaagaagaagaaggagtcagaggtcatcctgctgcccctaaagcaggattcctcattgacctcttttgaccccactgtggcctcagactcaaagggcctccctttgggcccctccctgcaggatgctggagtactcgctggacctgcagaacgtcagcttctcagctgtcaggacagtccgtgtgctgcgaccgctcagggccattaaccgggtgcccagtgagtgacccctcagccctcagcccctgaagagagccccaggaggaaatgtggaactctcagaccccacctctactactgtgtcctcacctgacccctcacaggccccgtcagagaagggctcagtggggagctgggattgctggaacaaaatggaactcctgaatgtggcactatgggagttacctgggaaaaccccacctcattttagcctggctttaggtcagagtctcagaaacatctcagatgaccctcttccttcagctagatgaccactccccccaggaggataggggtgtggggactggagaggctgacaggcaaggagtggacgcaaagtgctaatggccttttctagccagaacagcctctcatgcaatctggttcttgctggtgagacacgctggccacgctgaacgtgacttctctcaagacaaggccactccatgtctcaccctccgcctctgtccccttcctccttcccgcccccttccaacccattgcagtaactgccgggcccattatctaaattaaactgcattggtttctggagccagcgaggctttggcagctctagttctccctacatactgccccctccctttgctcaggccccctttgcaactccccaacctacacaagctgcagatggtccctgctgtggtcctaggagtggggtggttggcgaggaatgcatgtttctggggctcagtgcctgtttgtgtacctgatgtagcagcagccccctgcgctctgtgtgtgtgtgtgtgtgtgtgtgtgtgtgtgatgttgctgctgcccctgggagggcagagctgttgaatgtgtcctctggggctcggggtgtgttggtgttaacaggagctccagaagaggggcatgcctcgcctcctctcccgccccaggtgatggctggcagatttataggcctctgtctaaccaccggtgtaattcccttaatgcaaaccctgaggaattgatctcagttggagcacagagaagctgaagggggatggggtaggaggagggggagggagactgagtgagaaaactgggctggcaggggcgaggctgggcgctgcagtcaccaagagggttaattagctgctgcttagcagcttttgccctggaggggccagggggccatagatggcactttgggggtgaagccagccattagagatctgtctgcttgacgagggcttggcggactgggggctggttcagaccatttgggccggttgggttctagacctggagtacggagagagggaagtaaccctaacagggcttttgaggagggggtttcagtggctttccctatggagggggttgtaaattgatggacttctgagaagacagtattgtatctcttcaggtcctgatttggggatctggaccaagcagggaatagtttcagggaagcagggctcagagccatagtgaagcacagggcatcttggcccctgcctaggagctggctctcaaaatgagattcctgcctgctgtcattcctcctggagttcgctgcctcagtttccctaatgactctggtggtgataacttagaaaggtcaagtgactgtgcctgttgagagaaggaagtaggtagggagtgtgcgtgtgaatgtgtgcgggtgtgggtgtgtgttggagagggattcggaagccaaagcctgggttcgagttccggcacctacacttagcagctgtgtgatactgggtgagtcaagtcatttctccaagcctcagacttctcatctgtgaattgggagtgatattatccacatgtgatgatgttgggagagttaggaggggccacagtttccccagctcactgttggtggtactgtgcagattaccgtgggcaagccacaaggggaagtgggtcggggcaaggggctgcagaggctatctggggagtcagaggtgtctgttggtctcccctccagcttgagccgggccgtctcagcctcagagtccctggtggggcccctccgggagtgctgccgggccgtggcagtcagcctagcccggccagcctggtgtccccagcgtggcttctgcccccacaggcatgcgcatccttgtcacgttgctgctggatacgctgcccatgctgggcaacgtcctgctgctctgcttcttcgtcttcttcatcttcggcatcgtcggcgtccagctgtgggcagggctgcttcggaaccgatgcttcctacctgagaatttcagcctgtgagtggtggacagggtccagggaggacctgggagtggttatggggctgggcacccccccaagttcctcacttccggttgctactgacatatctgttctaacatctgagacatatctggttctcaaacttggctacccattggaaccacctggggagttttaaaaagtactgatgcctgggtgccacctccagagattctgatttcattgctctggggctcagcttggatgtaaggattttttcaacccctccagtgatcctaacttgcagtgaaatttgaaaatcactattccaggatgtgaccttccaacatcctgagtctggagtttccccactcaggcctcatgctcctggtgcccacaaatccctgccctgcccagtcccttccccattcttggttctgccctgctcaccctatatgcctcgagcactcgtgccatctctcccttcctgggccctctccctggagagcccactccccagtctcacccctgttccccttcccatcctgcagccccctgagcgtggacctggagcgctattaccagacagagaacgaggatgagagccccttcatctgctcccagccacgcgagaacggcatgcggtcctgcagaagcgtgcccacgctgcgcggggacgggggcggtggcccaccttgcggtctggactatgaggcctacaacagctccagcaacaccacctgtgtcaactggaaccagtactacaccaactgctcagcgggggagcacaaccccttcaagggcgccatcaactttgacaacattggctatgcctggatcgccatcttccaggtggggcagcctgggccccgggagcttccccagaacaccagccccaggacacagcccaggatcggagtggtcgctctcagggttggggtgggggtcaaggcctctggaggagactgaaggaggatttggtgggcccatagtcagcctgcccctctgcaccccctaggtcatcacgctggagggctgggtcgacatcatgtactttgtgatggatgctcattccttctacaatttcatctacttcatcctcctcatcatcgtgagtgactcctcagatccccgtggggatgggcgatcctggggacacctgtgggggcagtccagagaggggatagtttgctctgtctgaagtttttagctctcaggacaagtcctgtagagagggcatccatcatatagtaggagggacaccagatgcagagtcaggaggaaatccaaggtcaaggcgggacttaactgctattgggaccttgggcaagtcattctccatgaggcctccagcactgctctgggcctctgtttcttcatgggtaaaatgaatggttctcaacctgagatgataccacctctcccagagggcatttggaaatgggaaagggtgattctggttttgattttttttaatagctttattgagacataactcacatatcattcaattcatccctttgaatgaatccagtggttttttaagcatgtttacagagttctgtttttttgtaaggacaaggggagtgcaattggcaatttgttactgggggaggggagagaagctaaacatcctgaaatgcttgcaaataaagaattattctacccaaaattctgatcagtgatcaattggtgttaaatgctgcctgatctcttattcctgccagttcagaaattgccagactttaagaaggcagaagacggaggcaaaagcagcaatatttaatagttttaatcactaccattcatagttaataacttcatcgccaccactttgagctaatatttattgagcacttactatgcgccagcccctgatctaagcactttcaatgtgctggtgcatttaatcctcaccgtgatcctctccattttacagatgaggaaactgacatttcctcatttatctgaccctaccagacgctttgcctatgctgtgtattaatctccaagagtggggcatcactgctgacgtatgctgtaacatctgctgcctgtttaatcctcgtcgtcccctgtgaggtgccagggcagggattgtggtccccatctcttaaatgagaattcagcgccccagagggtgggtcactgggccaagatcacacagaaagtaagcggctggggctgagaattcagtcccaggctaacgactccacattcagcctttcttccatgtcaccaagaggccaacgacagagccagacagagggacagacattgagagaaagagattaagaaagattaagatctactcaggacctaggactagctccagagagagatgaagacaaaataaggcagctccttgtgagagacagagggtaggccctgagaaagagcaagtccccaaggccacctcattctgcctgcgtaacttcccctggtgcagaagagtgggcaggcttggggcgaagcctgactggaggcctgttcccatccctggccaccacctcaaggggtgaggccagtgcttcagggaagtggggtcttctcaccatgtgccccccccacccccactccctttccctcctgggcttgggagagggggaaggaagcagacagggagataaggggcctagtttccaccctcccacacaccccctgaaaaatctttcctaacagctctctggaatcacactagtgaagctaattatcataattactaggacacgatctagaaaaaaaaaatctgctttgtcaccataaatattcatttccttcatttgggattgttgtccaagcaatggctgttccagagttctggggaaactgaggcgtggagatggggactggggtagtgtgagcaagtcaggtggcagcctgactagtctgtagggtcaagggttcagcccctcccacatctgagggaggggggcacagggaaaatggggacagacaaggccaatggtccctgttttcagatgaggatatgaggtcccatggctaagggtctctcgcccaaagtcacacagctagaattggggctagaagcaggagtcttgtaaatgatgtttttgtcaagatctcaaggctcaatataatttgaaaaccccatgtccctaatattgcgttcatttccacagcattcgctactcctaatggaaattgcggaaggggtgctgcgtctctgcaggtgtgcgtgtttagggacagggaatttgagagattgcaggataacaccatgttcaatagcaatatcttggaatttcatagagcttggttccagtcttagccttgctctgaattagctgagtgatcttgggcaaatgtttgacctctgtggacctgagtttccttacctgtctgatggagattacaatagcatcacctcctgaggctgtcttaaaaataaaatgagataatgcttggaaaataactgagcgtggcgcttggctcataggaatgcctccgtatgtggtggctggcattgtgattcacttttcttcaggacatttcctcttcctgtccccacccctacaggtgggctccttcttcatgatcaacctgtgcctggtggtgattgccacgcagttctcagagaccaagcagcgggaaagccagctgatgcgggagcagcgtgtgcggttcctgtccaacgccagcaccctggctagcttctctgagcccggcagctgctatgaggagctgctcaagtacctggtgtacatccttcgtaaggcagcccgcaggctggctcaggtctctcgggcagcaggtgtgcgggttgggctgctcagcagcccagcacccctcgggggccaggagacccagcccagcagcagctgctctcgctcccaccgccgcctatccgtccaccacctggtgcaccaccaccaccaccatcaccaccactaccacctgggcaatgggacgctcagggccccccgggccagcccggagatccaggacagggatgccaatgggtcccgccggctcatgctgccaccaccctcgacgcctgccctctccggggccccccctggtggcgcagagtctgtgcacagcttctaccatgccgactgccacttagagccagtccgctgccaggcgccccctcccaggtccccatctgaggcatccggcaggactgtgggcagcgggaaggtgtatcccaccgtgcacaccagccctccaccggagacgctgaaggagaaggcactagtagaggtggctgccagctctgggcccccaaccctcaccagcctcaacatcccacccgggccctacagctccatgcacaagctgctggagacacagagtacaggtgagaactctgggtggaggcatgtgggtgccctcgtctggggactgggtggcgtcccagaggggactagggggtctggagtcagagggaccagggcttatattctcatgctgcctctcatggcttaggcaccttcaaccagtcacatccctgctatgagctcgaattttctcatctgctaaagtggaactcataattcctacattgtaatagcagtaactatcatgtaataagcacctgcttcgtgctgtttgcaatgatgtctagcaactgttgcacacagcaatggctgtgtgcctgtcacatgctttgcgggcaaaattccattggatcctctctacccattaagtgataggctttcttagcatccccattgtgtggatgagaaccaggaggcttgaggggattgcatgacttgcccaaggctttgctattggtgaggggcggactcggggcccgcactcgggactccttgttgtgaggctcagagaggaaatggtgtgtgactgtgcccagcttcatgccccactggctaaacctgagtctcattgcctccgcacagggagacccagttcagggagctgcttgtctgatgggtgacactcccagtgtcgtgggggcagtgagacacatagggacgtcgggctctccccagcagacaggttcactgtagctgcagcccacggcctgtgtttcaggaaggatgtggcacgtggggagcagcgggatattcgtggggatgttacgtgggaatgtgggctgggaccagaaggtgctatcacagaacccagagcgaaaggtttctatgccagctcctccactaccctgccacgggacgtgggccagtcacatgcacccacgtttttatttcctcctgtgtaaaaggcaaggctgggcccataattactctcagtgggtgcttactgactccctcctgtgtgcagatgcagtcaagggagaaatgtcgctgagagcccacctggggccaggccctgagcggggggcttccacatccatgctttacctggtactctctgaggttctcatattctgtgatcaaagctggatttaaagggacattgatgtcttgggctaggtccctgagtgtgtgcgcacgagtgcatctagtatgcgtgtatgcgtctatgtccatgaaggggtccagtgtgtgtgtgtgcgtgtgtgcatgcacgtgtctggtgttcatatgcatatgtgtgcacatgtgcttgatgtgtgtaggtgcatgtgcgatgtgaagctctttccttggtgtgtgtgcatgtgtgcatatgtctggcatatgtgccgtgtgtgaatgtgtttgtgcacacatgtgttggtatgtgcatgtatgtgtgcccatatggtggtgtccaaatagtatacatgtgtacacgagtgtgcgcatctggagcacgtgtgcaggtgcacgtgtctggtgtgggtgtgtgtgcaagtgcacgtgtgtgggcgtgtcttaaggatcccatggaaagtgctgctcagaacagtgttgatgtagtcctggcttctgggaaggggaaggggagcgaggctccttgctgaaggcacctaggatataggagctgtccaggacctcagaggacatccaggccacctctctgagccccaggacactcagcagtgactgtcaatgaagtgctattgacattagggcatcttgtgggtcaagactgcccaccttgcctgacattcagcacccctggcccactaagtgcctagcaccccatcactgtaacaaccccagactccctgactcattttacacatactcacagggcagggtagccccaggtacgagactctggagcctctcacctctactctcctgttccaggtgcctgccaaagctcttgcaagatctccagcccttgcttgaaagcagacagtggagcctgtggtccagacagctgcccctactgtgcccgggccggggcaggggaggtggagctcgccgaccgtgaaatgcctgactcagacagcgaggcagtttatgagttcacacaggatgcccagcacagcgacctccgggacccccacagccggcggcaacggagcctgggcccagatgcagagcccagctctgtgctggccttctggaggctaatctgtgacaccttccgaaagattgtggacagcaagtactttggccggggaatcatgatcgccatcctggtcaacacactcagcatgggcatcgaataccacgagcaggtaggagagtgggcagaggcagggctcctgccagctgcttttcgcctggggctggggccttctacctccctccgcacccctcctcctgagctcagcttcctctccatgctgctagcccacctggcaggtaggaggggaggtgggtgatggagcaatgcatggggattctctagagggagtgcttaaagtctctgagtatggaggtcgcctcaggtaggccacagggtatgttctacccaggaaggctgctcagaggaggctggctttgaaggatgtgaacaagtggtgagcatcagcatgtggggagaggcgcgtcactgggagatgtttgggtctttggagaaggtgtagtgcggagggcgggtgttggaggtcctgtggcatccatctgacccactaagtccgggtgtgactgattggaggcaggaggggccatgtaaacaggggtgcagaggggagggttggtgcctgcgcctgggtggaatgaaggcctgttggggtcagggagggaggcaatctttcctggcctcccgtctgggagccgtgctgtgaaccagggcagctcagggtggatgagagtgcccagcatggcaaggggacttgaagccatcgcgtttgaggaatgattctaagaaccgggatgtttagttaggaggagcaagggctcagcagggacaggcaagctgtcttcaaatatttgaagggctgtcatgtggaagaggaagcaggcttgttttgtggggctgatggctacaagcaataggatctgggctgagggggaggaggcttttctaaccctcagagctatgcagagatagaaagggtagcctgggggaccccactgatcccccatcatgagctgaagatgcccgcttgttgggggtccaagcaggcaccatgggtcctcacaactgggtttggctccctcttccacagggttctttccagaagtcgctccccctccccccagtctggcctttcaggtcacccctgtggctgattcttggaaaaggagagaggctagcaagcaggtgctgcagttcacggtcctcccaggctctgttctcctgggtgttctggcctccctggggtagcacggaggcactgggccatcagaacccaaccttccctggtttggaacgaaggccatgcacctccccacctccgcaccctcccaatcaggagcagaggcggagggggccagtggtgtggagtggctcttacaccagcacagcaccctgtgaaaggggcatctcaaaaaggtggtacaggcagggtggtacaggcatgctgggaggtctgggttgaggctgaggggcacaggtcaagccgggtctggagcagacagtgaggtgttcacttttccgggggattcgaagcccgcccccacaccactgacctctgcacctgcaatatttcgagcacccagcttttacccaagactgctcgacctggccaggtgcacccctccccatcaccatcacacattggcgtcccttcctctaacctccacagggccccctccaagcagccatgaggtggagagagagtgggaccctggctgcagtgccagcgggtgggcgcacttgacaccacggtgggcatgttgtgtctgggctacgtgggtgtgggtgtgtgtgcacatgccaactctgccagcctcccagggagaggtgctccactctgccagattggtggcagtggggggtgggcagcattttctgcttccgggacccaggtggtgacagcccctaacctcccattactcaggctccctgaacctcagcctcctttccctcacccctgttccggccatggtcaggtgcccctcccccagggggcacctccccagtgccccctccctaccccggggggagcacccagcagtccctgcccagccgatgctgctggtggaggttttgattgcactgggaagaagctgagtcacacagacccagggcagatgaagccttggtaagagggctttcagttagatgtcaagaaggacgcccctttggagagaaggcagcagccgtcagtcaggggtgcctgcaccttcttcttgctcaggctcctgaggaagggcggagacagcccagggctcccactaagtcctcagcagcagggaggcctcactcagtgacagcagtgtctgctccagggagggttttgtccgcatacctggtgctgagggccccatgggggtgagcgggagtccccagcaggctgggcagatgactgacagctgtccagcgggctcaggggtgcggagagtaagaagtcccagaagctgccatggccctgtgcttgcaggcactgcggcgtgaacgtcccgccatctgggccctggagcctgagcaggctgggagtggggggttgccagggaaggcagcaaggagatgtggggggctgagacagagacacagagtgggcacagagagggagacagagacacatgggggaatggggacacagagggagacagagaggagactgatgggggcgagacagaggcacggagggcaagatggagacgggggaggagggcaggaagagagacgcgcaggcaggggagaaaggatatggagggagagatgagccacagcggagacagacagagacaaatggagccacagagacacacagggagacagagacacagagagggagctgaagacagagaccgagtcccagatgcaaatgagggcagagacggggtgggatggggagacagagactcccctggagctggctgcatgaggaggctcacggcttccctgcggtgcccttaatgaggcaattgtgtccattgatcccggaatcgattggatgggggggcgggcactggaaagggtgttgctggtgctttgccagaggaggagtccctgccctccctcctggccgtcaccgctgccctccccaggccctgtcctctcccaccatcccctggctgactcatcattcgcttgtcccgtccccccaacctgcgctaccccaccatcctcctgactgaggaagcacctatatgtgataccccaccccgcccggggctggccccatgctgtcctctgtctcctgcttcctccaccccttaaccaccagctggaggagaactggcaggattgggtttgcccagagggctggtgagaaggacaagaacccaggagactgaggagagagcaagaaaatgacctgatgtcgaagtgtgatctgatatggggccagcctacatgtgtgccccatccgctcagggcggtacatggagtccagaacctttttccaattcatccttttgcactggagttgggcctaagcagtgatttgctggtaaatgattaacaactagcccttctaaaataataaagtcctgatctgtagcatttgccaatttccatggtgtaaatgctcccaccatagctggttttaagctaccaacacgattccaccgaatgtggggttgggaagagacgtggacaattggttctcccaagccagtgagaaacagctccagcacgccactgggcccaaggcactgtccttctttttaaagaggtcacaacaagtaaacggtcatatttacttgatgtggcacatgctcagagagggatacgtggaggaggagcccttaacccagaccagagaaggaattcagggagggctccgtgtaggaggtgacctctgggctgagtctgaaggaagagtaggacatagccagtgaaggtgaagggcagggcacagtatgagggctccggcagtggtccaggcagttcatactacatcttcatccctggaaatggagagcagagggctggggagagctggctggtagctggatctgcaggacccaatcagttggaaacatgggttgagaggaggcagcaaggatgactcccaggtttctacctggggtgggagcaatgtggcttgagcagatgtgggctgggagacatgttgcatacaaggtgcctgcgggccatcctgaccatatccagcaggctgtcggagctcagaaaagaagttgccttctcttctgtgtcctgcctggctctgcactggggccagacctctccaggaagaggggagtgcaggagtggggccttggagacacaggagcttcctaacatctccttcctggctctgggtcatggtggggtgggggacaggtgctagtctaatgttctagaagagggacaacagcatatggggagaggggagctacatgtagcccagtggtctcctgggctgtagacggggagaggaaggggagggaccagggtagatggccttgcaggctgagagaggacagggcaggtgatgactctgctcattgctcacactctggggccatcctgtcactccagatacatgtccagagagggtttctatttataagtgagtgagtttggctgttcaaggcgagagaagctgggggtggggcaggaggaggtggtccagatatggtaagtctgaactttgaaggaggtcatagactccttttcagttctgctgaaggctggggaccctctccccagaaaatccccatatgcctggacaccctaaatgtggcctttgagggcaaaggttgatggacacctcccaccccagccagtcccttggtctccagatagaggagccctggctgaagagctagggctgaggaccaagcagagctttgggggatgatcctttgcagctgactggccccagacattcaaaggctatctggtgtgggagggagaggggcattgttttggagatgtctgctaaggtgttctcttgttcttttaggcatcccctggctccaggctctcccagttctgcaaacaaggggagcatatcctgtgcacagcacactagaatagaatattagaatatcagggggttgggggctgagccagaaacacccaagaaatgtaggttctggtggaaaagtcattctgtttcatggatgattatgccaaatgccgcaagagaggcttcaggggacaaaggagagctgctcatccccagctctccttcggaagggcttcacgaaggtggtggcttttgaacggagcctcgaaagatgaatggaattgacagtggcttgggtggtgggggtggggggaggtgggagatggaggggtgggtaggagcagagagatctaggtggagggattaaggcacatgcacagggtggcactcgatgctctgaaggacagtcaggttttcctccctgccctggccccgaggtgtctgagcagtgattgatgttagcccagcgaggaagccggtgcttcccattggtgcaggctgggtggaggagggcctagaggctatttctgttgttcagatcagaggcaaagagggccccaagtaaggccatagctatgggaacgaggggttgtgggtaggacgcaatttcactggcaggttctctgggccggggcaccttagtgtccagagggaggaagggtgggcaagaatcctagataacccgaagtttctaaggcagaatcccgagcatgatggcgccacccgggaaggagcaggtttgggagaggaggcgagagggtttgttttggatgcactgagtttgagatggctgtgggccatcccaggagggagatcaggcaggctctggatctctggatgagaagccaggggcttggagagattgtttagtgtcgtctacaccccagtgacagccagagaggtaggagtgggggtactggtggagggagcgggcttagactgaactctgaggaatgctggcctgagggaagagaggcggtgaaatgagcactgggaaggggaagaggtggttgctcagggtcggggaagccaagggaggctcagctgctgctgaggcatccactaagaggagggctgggaagagggtccctggacagagctggagctgtggggcccagagttcagaactgaatgagtctggagtcccacagaagctttctgcttttaggcacgggggaaggagattggagaagtaatggatgcaggcataactgataggccagggcccaggggagccgggggcgggggtagggggtgacaggggggcggcgggggagcacatcaaagaatcaaagtgcaggtggaggaacggctggctcccttccaggagaggaagagagacagtgggatgcacaacacagagctctttggaggagggacgtggagccccccatgtaagcctgcaacgaggggccaggtggggagtagggctgggggctgcagagtccagaaggattgaggcagctcctgggggagagaggagacctaagaagggaggaaccagggactgtgaataaaggcatgaaacagccatggggccaccacccacagggaatcacttgtccagtcagcacatgttcgtgcctctctctagcgatactcagcacttccagagccgcagaggagaggaggagggcaagggcacttacctgggctggggctgggcagggcaggagctcttgaaagtcttcgtcagaagggcagcctttatgtggcctactgtggcccaccatgggctagacgctgtgcaggtggacaaggcacaggggctgcagctccagcattttattatttatttattttaagagatggaatcctgatctgccccctgggctggaatacagtggcttgatcatggctcactacagcctggaacttctgggctcaagcgatcctcccaccccagcctccccagtagctgggactacgggcacctgccaccatgcctggctatagctccagaattttaagtagcaggggccttgggtcagctgtcttgaagctgagtgggcaccgtgagtgtgctgtgcctagttagcttgtgtgtttacttttgagggcttcggggagctgggaaatatcatgtcacctacaccccaatgacagtggagaggtgggagtgggggtgctggtggggggaataagcgtagaatgaactctgaggaatgttgccctgagggcagagaggcagtgactgtggctaaagcctctccttggcactgcctctgattaggaggccctgggggcaccatgacacctagcagtgtgcccagtgggcaggagggcacaggaggggggatccaaactggagagcttccgggggctggggaagaccaggaccatgatctacatgatgaggcctgtgagatttccaggaaacctcctgccaccgaggtgttccctgacttcccacacctccttgaagacttgcctcccactgacccagtgaccctcactgcctcactgcagcctgtctgtgcccctgtcctgggtgggtgggagcagcaggcaggcccatcagaagcagaggtgaggtgagctgaggagtctgaacagaagagcagagatttcagggtcagtggagcaggtggaagctggggcgatggcagctggctggggtcgggcttgggcagagcacgagtgactggtccaagcctctgctcagctctgacgaggcctgtccagcccctcatgccctctctgcaagaggcacatcactgtctgccagagctggctctcaggcctcctgcctggactgctgcagtatcctaattggtttctgtctctaccctccaagccgtccacacgctgccaccactgcagccagattaatcttcttcatacactgctttgtacatctccttcctcccttcccacccgcccccagggcctcagtggcagcgtggtaggcagagacttgtccagagggagcagaggaaggctgttccacctggccctgccgaccttgtagccttctctcccaccagcccctctcaccctctgatctgggcagacaacttgattcttggttctgcactgtgccctgcacaccccttcccttgctgtccccagctggggacaccctccatggacatcctcccaggctgtcctccccactggcccactgacctcagccgggattgagctcccgtggctcctgggttttgcccccagtgtggtgtttagttgcagccttgcagatatcggtcctgccttctgtgagcttggccctggggctggggtttctcacagcctttcactcctttgttctgtagagcagcctcccaggaggtagtgttaccctgtttaacagaagaggccactggggatctgagaggcaaagggaattgcccaaggtcacataggaagaaagtctcagagttggtggcacctttctaacaccagtgtttggcacacagaaggcacttttagggctagttgatggagcagctatgaggcttggggagccccggtgctgggaagtactgagcagcttaacgctgctgcaaggtgacagccggaggggaggggagtggaggtgttaggaaatgggagatggagatttacagtcaacatcagcacagacaagagacctgggacctctgggtgggataagctcaggctgcctggcctcatttcaccgaaacctccactgggccttgacatctgtgaacagcaggaaggatgcaggctagacctgggaagggacttccacagctgggggtggccagtgaggggtggctggctccagcctgatgagtttgtgtgctctctgtgtgagctctgtctgggtatatggtgggggcgatgttgtggaaaaggtcttgagggcagagatgtagagggaggcacaacggacctggctctgcacctctccaggagggtgatgtgacctccatcaaggcaccacacccctcggagcctcagtttcccagactatctaggaggctcacagccctccctcgtttgttgtgagcagggaggaaatgaaatcccacgaggaggtcttcagcctagttggcctgtggtgggcactgccagatgttggctccacccctgccccttttcagccgtaattacagctctggtccctggggcaactttgttgctaagattgtgtctctatgtcctcgtcctgcattcgcagatcgttcccagcctccaatttagtaacttggacagacctggctatctgggggaggagggctctttttccatggctcactggagggaataccggggccctggagaagaagtggcatttaccctaagtgttgcagggagactagagagagcaaggcagggccgagggagtgcgccaggcccctttccacctgcatcaggctgccctgcttttccaggcctggagtcacttggctgggcaaaacaggggttccagcctttgctggcacagcccttgacaaagttcaatgaggcaagccttatgggacggcaggcttctcaggagcctggcatcatccttctccataagcctctcggtggtgtgcaggagagtgaggtgtgcacgtgtccacaagccatcagtacagactcctgagagccccgtggataacatcggggagtgaagagaacagtctccttctccacgcacagtagtagtcggacttttagaattcactgattgagtaaatacatgacatcaaaagctactgtgttttcagcaacttttaaaagaacgtttcattaatttttatttttagcagctttttgggggtatagtttatatgccatgaaatttgcccattataagcgtacctcagctgtgtcttcacatcgagttggtctttattcctagaactctgttgatttgaatataattttagaagacacgttgtgtatccagtccaccgtgtatctggattcacaagcccctcaccatcaccgtggcttggttctgaatcctgactgtctaatattcttggagtcagagggatgtgggattgggccccaccccagctcttcctgccctgtgactttgaacatcatacctgtgcggtccatgttcattttaatctaatccaaggcccgaaaacacggcgagtggcagagtgacagggaggagggtttgccgactcccgctccctggcagaccggacttggaagtacagagtggggggatccacttagccaggtggggtctgagcccagggctttatatgcattgatcctggccccgccccacctcctgtactgtgctcacgccggagacactaatggccctgtgtgaccgggctaaccaggtcaggtggcagtgcccccactcacaatccacggagctacgacttacttgagatctgctggagcaacgggctccatgccatactggcccccacgacagccactccccctctgcatagctggctgtctgcctgcctgctggccctgactctgcccccaggcctgcctttgaacagtctgaaagtttatctctctctgagtaactgttgtccccgaggctcccaaatgccgctcacctgctagtcagaagccccttgttccgagtcttttcacctcccatccaagctggctgcacaaactagggccattaggatacatttgggtgtcctcaggcctggctgcaggcttggttgggcagctggccagcgagacagtgagaagcaaggagaggtgtctgatggaatgagtgcctcatttgaatgtttcattaacccatactttttgagcagctactatggacttggcctctgccctccaggccagacacctagtttgtccagacatccatcaggtggacagtggggtccattgagccaaccatatctcttcttgcttccccagccctctgcctggccacacccctcccttcttcaaccagaaccaggctgaggttgctcatgatccccccaccccgtgccacaccacctagacccttggctggggagactccacaaacccttaggcattcaagtgctgcctctctcccaactaagcctttctctgtgtgttcacccctcaccttttctcccctgaactcccggacttgctgcctggataatttattttggcactgaagcatttaaggcctcttgtggttattcagccgttttgtgtgtgtacaacgtgtttctagcagacactgagctcctgggaggcggggcgtgtggctggcatgtttttgcagctcctttaatgcctggtgcattgctaggcacttcatattgaaagcgaggtcactagtgagctggaatggcagatgagacagggttcgtcattcgtccttctgaggactctagggtgcatcctcagtcccagtcccagactcgggtagggagcatgaaaggaattacctctggtgtttcacatttggccagagaggttgagaatcttgctgaaggtcacagagtgagtgacaggataggctgaggattaacccgggtgtcccgggctcaggctgaggctccaggtgtctcctcaactgtgacaacccttcctgggtgtctgcgtgtcttccttctgcctatcaccatgtgtgtgactgggaatgcgtgcatttttctctctctctctctctctgtgtgtgtgtgtgtgtgtgtgtgtgtgtgtgtgtgtctggaaggaagcaagagtagccaactgttgtccaagagaaagctgccaagtccacagagtaattgtggaatacatgtgacgttgtgtggggcttgacgaccgggtgtgcctgtgaggccttggcgatcgccctctgacatccgccagcattgtcatgctgctggcctgggcccgctaggcttgcattgtagcctaggtcaagatgggccatgcagctcccagcaggagatagggcggaacccacaccacaggcctcccattgagtttgtggcccctgaatctgagacccagagctggggctatgggtttcacgtggccctttcctggggcccctgcccctgggtgcatttcctcctggagcctttggggcagggtcctccccatgggcctgagcatccagcaacccctccgcacaagcttgctattcctgctcctcctctccctggtgtcccatgtttggaggactggatcgaggggctcagtgataagccagctgcctcacatcccaccctgccctgcagcccgaggagcttaccaacgccctagaaatcagcaacatcgtcttcaccagcctctttgccctggagatgctgctgaagctgcttgtgtatggtccctttggctacatcaagaatccctacaacatcttcgatggtgtcattgtggtcatcaggtatgactaccccccggcactgactctcagttgaggaatggtagcaggggtggcttggggccaggggccatgccacctattcccctggggtggaggggtctggagtcaggccccactgaccccacaggacctgccactcctcctaggtggggggctctctgtgtccccatgccccctccatctctctcttggccccaccttgctcctgttgaccttgggctcacctcttcattgcccaggcccctctttagtctcctctctccacttctacctcttgtccttgaccccacccaggcctgggatgggcgagggtgagattggctttagaggagttggaagaggtatgaggcccagccagctgcccggctcgaaaagtgcttggaaatcatctcagacaccagcaacttgctttagggtttccaagaccttgggaaagtgctccgtccccgcaaggcctggggccaggagaaccactttattgcttttggaattggctttagatttcattagaagagaacaaagcaaatattccataacttgatgcagttgcattggccagatttagggagggagttgtctactgccaggatgtgatctctggcagggaggagagggcggagggggccggggctgtcacccaaatcctcactatcttggaggctcctgcttagaggtctgggggcccacctgtgccccattttctctcgacgtgcccacccagccaggcccttgggtgctactgagtcctctccgagggagtagggggagagggtgaaggtgcagggggctcaggctgcctgccccctttgcagcgtgtgggagatcgtgggccagcaggggggcggcctgtcggtgctgcggaccttccgcctgatgcgtgtgctgaagctggtgcgcttcctgccggcgctgcagcggcagctggtggtgctcatgaagaccatggacaacgtggccaccttctgcatgctgcttatgctcttcatcttcatcttcaggtgagggcggcatggcaccttgccggctgagagaccggccaggctgggggcaggagggcctgaggggtgaggagcactgggctctgatccctagcttgtggcccccttgtgcccacagcatcctgggcatgcatctcttcggctgcaagtttgcctctgagcgggatggggacaccctgccagaccggaagaattttgactccttgctctgggccatcgtcactgtctttcaggtgcgagggtaacagggcagggcgtggacaggggccgtcaggtgcccctagtataggccctgattcctgtcttctgcccgcagatcctgacccaggaggactggaacaaagtcctctacaatggtatggcctccacgtcgtcctgggcggccctttatttcattgccctcatgaccttcggcaactacgtgctcttcaatttgctggtcgccattctggtggagggcttccaggcggaggtaacccactgctctgcccacctcaccctgcccacagcagtcccacttccaattggctgcctgtcttgagcctcctccctctgttgccaactttgggggcctgggaagtcccacaggaagagcctcttagactaagccggggtggaccagggcgggaggctccagatctcgtgcagcccctcatcacatgggacacagggtggttgtttggggtccctccaccaaagcttagctaccgagtagacatccccttcagagttggctagaccccttccccagagaggcagaccagataagtgtctgcctgtggtgcagctggactcctgagcacagtgctctatggaacacccggagaggacccctctgagccgaggggtgcaggaggcttgtgtgcaagttatctgagctctgactgagcagatgaagatgccactaagaccagagcagggctgagctgcccagggtgagaaatgagcccaattagctacgggcatggcagagatgagcgtcctatttccagcccaggctccatcaccttcgtcacaggcagcgtcatcaattaatattgatttacattgatcctgcccttgccatgtcagcgagcagcctctgcccagagggctgcaccccctcctctccctcagctctgcctctcttcccacccgagcccccagacccaccccagcttgctggggcttcaaacagggcagtttgacccaacctagaaacgctccaggttgggtctggagaagctcttggtccagttctctctgggtgacccggatggaaactcccgctgcggcctggtctataaatacctggcacacggtggaaaaacaaaaatctattttccgactctttcccagtctttcaagggagggcttttccctgtgggccggctgggttggtggggtgcagcgtatctgtcccacactggtctttctccccgctacccttttcagtctgtagttatccgttatcgcatttcctccctcctgtggggcagccagggcagctggtgggggaggctttggtgatggctgtgcctcttgcagggaaggagggagggacgccggtatgctccctggaatgggacactaatttgggggttccctgaggcctgaagaattaaggggcaccacagtactcccacaagagccagtagactcactctgctgctgctcagggtctataagaggaggagctgagtgaggaccgggccccctggccccttctgaaggcagctcctgccagccacggttccctcagaaaaattcccgtgcaactctgtggagggaaatggaaaacaccgcgggcctattcccctcccctcctctgccactcagccgccaaggcagtctggaggtgcccagcacagatggccccctccccagcactcagccctttcagcaaacaccttgttaacttgagtgcagctgagcggcctggttgctaggcaacagcaaagccagagtgtgggaatgagcgcagcctggccctggggcggcctggtcactctggccctgctgggggcctgggactgccccagtgtgagggctcaacaaggcccacgcagccacaccctccccaaccttcgcagtatcaggacctttgcagggagggtctcactcaggatgcggtgtcttgggctgggatgcttcaggcctggggtgggatggagaaaggactttaagaacatcccctctccatgggagtgggcagtgactgtggccccggagtgcccatgggaggggctgggccagttgctcccctgtcctgcatgtggtgggcagggctggggagtgtccttcgatgcccatggcctggacaactccaaggcacctgccctctcctgggtaaggtttcagggggccccacggtctggcaggggagtctggttttgctgttgtggtggcctgggatttttgtttttattttgacaaataagacaacccaccttggcagaggaagtggctgcccccattttggtgggcttccccagcaggaggcttcaagggtagcccccctgctggccttgctaccttgccaagagctaggagggggtggtccagggacacagcctgcttggctggtgatttcctgacttgcagggggcagcgccctgaatccctgtgtatttatcattcacacacttaattaaatgaacaggcagcaggccctgtgtgaggccattaattgatactaaataacatcagagccatcatctcagcattacttgtcacatcccatctcaaacggagcagctggatctgttctgatctgaagggacttaagctgagagcatgagacgttatgaggcctgacttggctccgtgttgactctgactttcgtccattcctttccttgcttcctacccattccccaagcccactgcctccgaaccggtgagaggagagtggtgttctgagccacagactcgggttccaggcccagatccacctcttactctgtatgatttggggcagtttccgcaacttctccaaatctcgggtttctcttgtgtaagatggcgatcctggaacccacttcctaccttgcaaggaagccagctggtgttaaggaggcagtttcccatgccaggcacacccttaatgaatggtggctgttattattaggattatggggggacctgcccttgtccccatctttttggcctctgcactcacccttcagattcattctggcctgagggcctgtagttgaattctggaaggctgttctgtcccctctctgcccccccattccccgtgtctctcagttcccctgctgtggggtttgcgcccctccttttcttcatcctctctcgacactgccgatatctgaaggccccgagcgcctgtgaccagcagccctcccctgcctccccctttccctgtaggaaatcagcaaacgggaagatgcgagtggacagttaagctgtattcagctgcctgtcgactcccagggggtaggtacgcgatcatgagccggcatgcctcccgtgccccatgcccgtgcccctccactccgcctccgtgtctctgtgctcgtgttcacgctccgctgctgtgcaacctgtcatagccgtgatggtcattggtgttgtgaggtttgcttcgattttaagtcccttcccccttgaggacacggaagggaggcacctccttgcctctgcccccatcaacccaccaagggcaccatctccatccctgccagactggtggatgggccggagaaggaagggacttagaatcctctgtgtgcacgtgtgtggggcaccccgtgtgtgcgtgcctgtgctgaggtcccggaggagtcccagacgtccggcttcagtggagtcaagatctggccgtagaccatactcccccatctcccaccccttcaccccttgccccaggcccctgttggagaccccgcaagctgtctcagctcaggacaagtccttggaggatgtggggatgggatgtggctcttgccaaaatgtaccaatattttaaatcacctctgagcctttggccccttcatcacccacttgggtccggctggcgctgtcagggctggctcccggtctggccccacgatgagcctgtgctctgctgttccctgccccagcaccagaattcggggcgaagccagcattcctgtgggaccccatggtgctgcatatcccgagcagccccctggagatcccacttgataattaaaggcctcgttagggctgtaaactgagttaatgaaaatgatcccctgagatgccaattacccaatatttatgtccttatcaaaagtagcaatcaagtattttttaataacttcttaaggagaagtatgtaattactggggaacctactgacctgctaagaagaaagaaaaaactgtcccagagacagggagagaggtaaaaatggggccagggagggggccgggacttggggaagatgaagggaagacaccgagggactgaagtggcgtcctcgggctgagctgttctgtctggggtctttcaatttccttccagggtcctcgagtctgaggctcaggggaggggagccgtggagagaaagcaaagggcctccagtgaacttttgcaagagaggctctagtgaccacttcactcaggtccccaggtccccagccccctctggcctgtgccacctgccacctagctaccccttctctccccagccagccttggtgaccgttcagccaggctggttgtgctgtgggctcacataagctgtggccttttctgaggtgtggctggagaggcagaggtggtggggccctgggaagcctcgggccccaagcctggggggtctggcctgcgccgtgcatgtctcgtgccgtggttgctggttcctgtggcctatatgtggtgtgcgtgtgtgaagagagggaggcccggtccatcccaaccacccaagcctggccggatccctaatggtccgctgctcccctgccctagggagatgccaacaagtccgaatcagagcccgatttcttctcacccagcctggatggtgatggggacaggaagaagtgcttggcctgtgagtacctatcctggggtgcgacttttggccctgggccagccctgtgtggactcgggatctctccctctctccccgtgcagtggtgtccctgggagagcacccggagctgcggaagagcctgctgccgcctctcatcatccacacggccgccacacccatgtcgctgcccaagagcaccagcacgggcctgggcgaggcgctgggccctgcgtcgcgccgcaccagcagcagcgggtcggcagagcctggggcggcccacgagatgaagtcaccggtagggggtgcatgtgggtaccctgatggtgggagatattccaaggaggacaggaggaagagaggatggaggcaggcgggtccaagggcacagcccctgccccatgggctggatggggcctgggtgtgcctggacaagcccctggggaatctgcgccggtgatgcaaaccagggtaggagccctagcctgggggctgaaaacagggcctaagctgacctcttctgtaccctagctgagtgacctcgggcaagacgccaccgctctgatctgcttctgtaaaatggaggtggggtgtccatacctcctcaagactgaataataataatagcagaccctcatctaggtactgactctgtgccagacactgttctaaacactactccgaagcattctaaatgcatttaatcctcacaccaaccctgggaggtaggtaccacaatgatccccattttacagagggggcctgagcctcagattgcagaagggaatggcagagccagcattttaatccaggaggctagtgttggtgcccatgctctcatgattttatttatttttaatttttttaaatttcgcttttaattgacaaatactaattgtgtatatttatggggcacaatgtgatgttttgatatatgcatacattatgggatgattacatcaagctaattagcatatgcatcacttcacatacttattttttttgtggcatgaacatttaaaaatctactcttagcaattttgaaataaatatgcattacgttattattgactatagccatcatgctgtgcaataaatctcgaaaattgattcctcctgtccaactgaaacttcgtatcctttggctaagccttccccattggtcccatccttacctctcccaaccccagcctctgctaatcaccattccactctctacttctatgagttcaatttttttggatttcacatataagtgagatcatatggtatttatttgtctttctgtgccttgtgtatttcacttagtataatatcctccagttcatccatgttatcacaaatgacagtcttcttttttaaggctgaatattattccacagtgcatgtatgccatattttctttctttctttctttcttttcctttccgctctgtcgcccaggctggagtgcagtggcacgatctcaactcactgcatgcaacctctgcctcccaggttcgagtgattctcctgcctcagccacctgattagctgagattataggcatgtgccaccatgtccggctaattttttgtatttttagtagagatgaggtttcaccatgttggccaggctggtctcaaatacctggcctcaagtgatccacctgccttggcctcccaaagtgctgggattacaggcatgagccactgcacctggcccatattttctttatccagtcatccattgatggatactaggttgattccatatattggctattgtgaataatgctgaaatgaagatgggaatgcccgtatctcgtccacatactgatttcaaatcctttggataaatacccagtgctggaattgctgggtcatatggcaactctatttttaggtttttgaggaacctgcataccgttttccataatggctgtattaatttacatttccaccaacaggacacaagggttcccttttcttcagatcctcaccagcgcttgttatctttcatcactttcataatagccaatccaacaggtgtgagataactcattgtggttttaatttgcatttccctggtgattagtgacgttgagcatttcttcatgtacctgttggccatctgtgtctccttttttttgagatggagtttcactctgtcacccaggctggagcgcaacagttcactgcaacttccaccttccaggttcaagtgattgtcctgcctcagcctcctgagtagctgggattacaggcgtgagccaccatgcccaactaattttttttatttttagtagagatggggtttcaccacattggccaggctggtttcgagctcctggcctcaggtgatctgcccgcctcggcctcccaatgtgctgggattacaggtgtgagccaccgtgcccagccctgtgtctccttttgaggaatgtctattcaggccctttgcccattttttagattgggttgattttttgctgttgagttgtgtttcttcaccccattatatatactgccactcagctgatgataacacttctctcaccaaataaatgaggaatgagctctattgccatatctagtttacagatgaggaaacagatgcacagagaggcttaataacttgccccaggtcacacagctggttggggtgagccaggatctgaacccaggcatcagagtccagagctcctgctcacatccctacacttgatgtgatgccagtgaggctcccaggagaccgggtgcacatgagaggacagggctgctgggccctgcctgagaccactcctcccctgctcacccacagcccagcgcccgcagctctccgcacagcccctggagcgctgcaagcagctggaccagcaggcgctccagccggaacagcctcggccgtgcacccagcctgaagcggagaagcccaagtggagagcggcggtccctgttgtcgggagaaggccaggagagccaggatgaagaggagagctcagaagaggagcgggccagccctgcgggcagtgaccatcgccacagggggtccctggagcgggaggccaagagttcctttgacctgccagacacactgcaggtgccagggctgcatcgcactgccagtggccgagggtctgcttctgagcaccaggactgcaatggcaagtcggcttcagggcgcctggcccgggccctgcggcctgatgaccccccactggatggggatgacgccgatgacgagggcaacctggtgaggcccctgtgggcacagtgacccctcacccctgaccttgaaagaggggaggtgtgcctggcctggcagggtataagggagttaccattccaagcccacggaatatcaaggggcacctagaaaccgagctccaaacaatcccttttctccctctgcccgccttgccaagccccagatccttgtcatgcctatgcctggggctgcggctctgccacccttggtggatatgaatgattttggacagatgtgtatgaatctttcatggccctccccctgtgactcagaaagacccatcactcatctctccaaactgatgccccgcatccccctttctcgtctcaacctcatcacaagccatgacttcccactctatccatacccatgtgcccctgccccagcccctcatcaccaccattccccctggggatggggtgcagtgacctcagggttagcatgtgaagagcagggccagtgtctcctcagctgaggtgtgtctctgaacagacagctgtgtggggccagtgtttgataactgatgctgcttcccagctcagcagggaggacaggcagggggctgggctggaggcaggggtggggagaggggagagcggggttggggatgcaggggaggagagggaggaggtggagaggcaaggggtcctcagggatggggagggggcctggcaaggttgacagggagatgaggaggtggctttaggaataaaggaagagaggcagggcagagcttgggccccaggtgggagagggtagacaaggagtgaggctcgtgactctgctgaggagccaggagccggggaacctggaggcctggtcctgctcatactccagtgtttgttctgcagagcaaaggggaacgggtccgcgcgtggatccgagcccgactccctgcctgctgcctcgagcgagactcctggtcagcctacatcttccctcctcagtccaggtaagtgacagggcaggggtctgacctgtgtcccgacctcttcttctcacgggaaattaccgctggtgatgctgtcagggatttgagaagtggcaccctgcctggggtgtgagcagggtggcctcagctgggagggcactggaggggcaggggctgcgggcggtgcctctcgttgccacctgccctgcctccccctctcagccgttgcctccatgcctgggcaggttccgcctcctgtgtcaccggatcatcacccacaagatgttcgaccacgtggtccttgtcatcatcttccttaactgcatcaccatcgccatggagcgccccaaaattgacccccacagcgctgtgagtcaccagccccgctcagggcaaggcctctcctggggtttgcactcaggaccagtgagggaggcaaggaggccacagttgctgacctgcaagtcacacagcagggaacgagggggccaggactctcctttaggtctctcaccagatcctggtccccgggatgccccctgtgtcctctcctgcctcagtttcccttctatgatacatcagcccagctgggtgctttgtctcattccaggctatttctcatgagccagagccttgtggggcacacgcgtgagtcggggagtgctggggcggtgcaggggctgtgtgcagatggggaggcatcttgcccagtctgcctcagggcctcgggggcatgcagagtggccatggaagccgttctttgctcctggtcatccttccaggtcaaaaccaagtagattttcaggggccatagtggggacatgggtcacttctgcttggctgcgaacctgtcagtccttctcagaaggagagccagaggccctggacataccgccccagggtcgaaccccttcagggtgggcccagctcaccctgggagctgtctcttcctagcctggcattatagcccttcgctgtcggcagcaattctggttccagaaggatgggtggggggtggttgtgtttccgctcacggcatcctgcaccacttgcttagaggtggccagggtttgcctctcatccctctttgccatctcccacaccattgtttagatttcagcgctgctggggcttctgttttctattagggtcggggtggagggagcctgaggaatggcgggagcagcccaagactaggcgggtgagagagcacccgcactggggacctcacacccggagtcacagggtaaggcaggggcgctggctgcactccagccttggctgcctcccgcctgaggccctgctgtagagctctctgtcaccatgtcactgtctccacgtctctctcaccatcttcccactcagcttctccatctccagctctgtcactgtacctgctcctctccttccctcctctctgtgctcacaccctgcccgccacctctctagagatctgcgcctgcctcctggccacccagggagggactcagtccacagatgccagggaactagatggccttcctccctgccctgccccagcctgtgcctgggggtgcagagtctgtgtcaggaccccagcttccactgctgctccatttctggggtgcacagcaggaaagcaagtgaagagggtgggatggcaggcaagggtcagagatcaagtgagatcctgccccagtttttaaaaggaaccagggaatagggcttaggacgtgggacgcagatcacagcactgcagtgcagatcctctcccccttgggctaagtggctgtgggggcggggagctctggtcacagacaggggtgtgactgtccacagagctgcaggggagtcagggggcctggcactggctctgtgcgtgtatgagaggggcgtgatctacattgttgtggagggtgggggtcgttttctgagtcaaatgttagaagcaggttttgacttgtgtatgcagagcagacctggcccaagggtgggggcttcctggcgggcaacccctgcctcccctctcttgcaggaacgcatcttcctgaccctctccaattacatcttcaccgcagtctttctggctgaaatgacagtgaaggtgatgggggctggtgttggcttgggacctctggttcctggtgggggtggagacagcttgggctgagggtgggagggttggctgcagcgcagggagggcggccgatgacgtggcggtggtccccaggtggtggcactgggctggtgcttcggggagcaggcgtacctgcggagcagttggaacgtgctggacgggctgttggtgctcatctccgtcatcgacattctggtgtccatggtctctgacagcggcaccaagatcctgggcatgctgagggtgctgcggctgctgcggaccctgcgcccgctcaggtgactccctccccagcactggaacacctccaagaggtggccccctccgcagggacatctcccaccgccagcactccctgccacgaaacaaaagcctgcacaggccagcatcctgtctgtgacccccacaggcgatcctgtccccgccccagacaacactcagattacggccgcagtaatttccctccaggtgcacacctgctttcctcctcttcaacatgacatattcctcagggccgctgcaccatgtgatgtaaggtgactgcagccctgtgcagcacacagcacaaggggccacgagcaggactctcacagtcttcagctgcggctctcccttgtgtggcctctaggggtgacactcagcccctccccgtgaggtgacaggctcctcttgctggctttccccatcttcaggcgcctgccagtgaccaccccccggtgacatttctcctgaccagggatccaccctctcaggaatccctttccaatcagccagtcaccacccccaactcagattttttttttttaatagggatgatgtggactaatggcgatgcttccctgactgtgatagtccatctccctctgccccttcccctctctgcctgctcccctacaagtttatctcctggtgcccccaacccacaatacactgcatctctagggaacgcctcacttgagttgaatcctccccactcccaacccaaacaggtcgtacatttgacatcctgggatggaggtggagatgtggggcatggggatctctgccacttgttttgagagattacaataggggtcctgatggcaggggtcccatgaaaagaggacttgtgttctgccaccagaggccaggaagggaccagtggtcaaggttgggggtggggagcagggtcaagggacaagggagggtctgggctgggggaagccttatcacctccctccctcccctccccagggtgatcagccgggcgcaggggctgaagctggtggtggagacgctgatgtcctcactgaaacccatcggcaacattgtagtcatctgctgtgccttcttcatcattttcggcatcttgggggtgcaggtgtgtggggttctgggggccagctgtgggtgaaagcctgaagagggcccttccccttggcccctgggtcctatggctcaagctgctgttgctgccttcattccagaaaggaataagcagggacgcttccctccaggctctaggcccttttacctcctgggcatttcaaagaaaagtgggagcctagaggaaggccccaaggaggaccggggctgccgagaggcttcaggccatgggagccgcaggctgctgttcctgccctctgcacgcactccctgagcacagacgctggcccgcggtctactccgggatcccctcccttccttcccggctcgagcacagtgggctgcaggccaggtctggggatccagggcccagacagctgggccaggttagcagcgtgctggcaggcaggcgggtgcagaccccagacgaggcaggaagtgggggctgctggggaaacttggccttgggcccagggaggagacttggctttggaagagaaagagccagagctgcctgcaggattcagcagacgcctcagggggccggggagcccctccatcatagtcttccagggcccttggctccagctgtttcagctgcagggtagacagctggctgttcaggcagcgtgggagcccctgggtggctacaccctcccctccccgcccctcgttcccttggcttcctgggatgtccactctgccctgggttgggggctgttccctgacttcctagaaattctctagccctagggaacaggctggggtgcatttaccaaagctgtgtggtgcctctctgtacaccctccccactcccacccagtgcccttccccttcctcacttcccagcctccttgggtcagtagagtgaagcattgttgagcccagtccttccggtggatttaggtctgttttgagcagtttgctcaggccccctggtcctgccttccgtttttcactagtggtcatagcctggtttataatggaatgagggtgagctttccaatcagacagacctgggttcgagctccctttctgctacctgctggctatgggaccttagtgagtggattaacttctctgagcctccgttgttcttatctgtaaagtggggttgatgatacccactcccccacccagagctgctgtgagaattaaatgcccagctcagtggttctcaaacttgagtttgcgtcagaatcaccagaacggcttgttaaaagatcgctgctcccccacctcagagtgtatgattcagcagatctgggctggacctgagaagatgtgtttctagcatgttcccagatgatgctggggactcccacttggcacacgcctggcctaaccgttggtggaagatgaatgactgttacccgcctccaccctttcccactgcccgccccgattacctttcctccccactcttggaaaggaagggggtgtcggcaggggagactcttgtcagtgtttccctgacttgactggccccagagcagagcaccccacactcactcaaaatgtgcccaggctggcgtgggggtggggctcaggagtcctgggcttcctgtggtcacagctcacttttctctgtctctgggaatgtgtgtccagctcttcaaagggaagtttttcgtgtgccagggcgaggataccaggaacatcaccaataaatcggactgtgccgaggccagttaccggtgggtccggcacaagtacaactttgacaaccttggccaggtgagccccaggctcagaggtggggctgtggtgaaggaggctggagggggcacagggccatgcttagtgatacctgctgactccggtggaggtgggctccacgaagagatcagcccttcacaccctctgctgtctaaccaccagcatgtcgcaaagcccagtccatcccacagtgccccaaaaagtgggcccatggggtctctagccgtccttaaagatgaagaaacagaggctcagagagggtaaggggcttgcccagggccacagagctacatggtggagcaggaagcacacgtggcagtgggggcaggcagccctggatgtgaatcctgtgcaaatcctgaccccaccattgtcagctcaatgacctggagcagctgacttaccagggcctcagtttcattaactggtgaatggagtcataatagaatctcctcggaggtcacaataaggatgcaatgagatgatgtgtatatttctttaacatggtggaagggacggatatattgtcaagataattcctttcctcactccatatttgcagaaacagaaatgcagaaaatgaaattgctcgctcagttttgattcccagacccactctggttttggtttctggatttccagggtttttgtgtcccttctcctacctggcggagggcagagggtgtgaccatctctcagggcccctccagctgcagctcagttatggaaccctgagagggagggctctcctggagcctggagtgtgactccagcttgacccctcaagggctggggtacttggagctgatgcaggaggcactttgggggcaggtgataggtgattcagccacacatcctagacttcaaatgtctccttctcctcctccccatcaggccctgatgtccctgttcgttttggcctccaaggatggttgggtggacatcatgtacgatgggctggatgctgtgggcgtggaccagcaggtagggctgaggtgggcaggatccatctgtgggctcaggtcactcagcatgggctgattccaggacagaaagagcaaggcagggtggcaaaatgccatgaaagaagcatcatattttacagcagaggctgttgctggtagcctgtgggccaaatctgggcatgttttattggtctacaacatgtttaacatgttttgaattagtgatgaatatttttaaactggtgaatttgggctgtgtgcagtggctcacacctgtaatgccagtgcattgggaggcctaggcaagaggatcacttgaggccaggagttggagaccagcctgggcatcatagcaagacccccagctctacaaaaaataaaaacaattagccgggtgtggtggtatcatctggagtcccagctgaggtgggaggatctcttgagcccaggagtttgaggctgcaataagctgtgatcgcaccactgcactccagcctaagcaatagaacaagaccctgtctctaaaaaaagaaaaaataatggtgagttttacacagaaattcagatttgtgtctactcaggaaaagtctgaagatctgggaagactgggcttgcattccctcaaggcaggagtcagccagaacaaagaggcagttttggatggagaatctactctcccctttaccacagtccccgcccctccctactgcttcacatcaaacccacaccattcatttccatcgcctgtcaggcggctgtagctatttgggttcgcaggaacccaggctgtgggcagctcctaagacagcttgccctcgggctgatgcctccgcctgtccttcctgctccccgccagcccatcatgaaccacaacccctggatgctgctgtacttcatctcgttcctgctcattgtggccttctttgtcctgaacatgtttgtgggtgtggtggtggagaacttccacaagtgtcggcagcaccaggaggaagaggaggcccggcggcgggaggagaagcgcctacgaagactggagaaaaagagaaggagtaaggagaagcagatggctggtcggtagtctttccacctctctctgggtcgtgcttgaccttggccttgcgactgcagggggctgggcgctggggccgggggcagggagaagaggctcccacccccctcctcacctccttctccccaagagcatgtctgcctttagagcgagcatgaagcagaccacttcagccccatgggtagggggagctgtccccaccctggggcctcccaggacctcagcatcatcctccccagatgatgccaaatggaggttgacacccagcctccccgagcttgactctcagaggagcctcactggctgctccactgccccatgccagcatccagaggcccagggtgggcagcaagcatctcaaccctgcacccacctagtgtctgcagctgccgagcaaagcctcagcagatctcagtaatggacaacagcgtaaaagagaacccagacacccctccctccctatctctaacaaaactttctaccatgatatatatatatatatatatatatttctgctaaacttaaaaaaagaaaaagcaaaaacaaaaacaaaaaaagaaaactccccttggcttggggaagttctggaataacctggggccctggagcccctcacctcctcacctgtgctccccagcatctcttggcattgggtgggtgaagcccccatccgtccgtcctcatgcccttatgccatgggtgggccgagactaagtgagaagacagaggccaggaaggatgtgagagacacagcaggcgcccaggcccctttgtttctggggcatccccagatgcgtctgcacctgtctccctctctcccgggctccagggctcccatctgcctggtacagcgtaatctccgcgcctctctctctctctcagtcacggcccacgtctctctaagtgtctttgtgtgtgggtttatctaagcctttgtgtgtctgtctgtgtgtctctctctgtttggggtgagggtttcccatgctctcttcaccttttcacaaatcgtcttccttccgccgataagatgggtgcggtggcctgagttttcctttggtgtgttcacatgtgagtaccaccaaatgagtgaggggttgccgtgcccctgcctcccctctgccctcagctctatctccctcggcctgggagtggcactctgaggcggggggagagtgtgggagttgcagacgagggtggaggtgggagggggcctgtgttccctgtgaagagcgggagctgctccaggatgtgggggagacactggcctctgggcagcaatgggaggtgccgttctccacgtccccaaccctcactatcagcacccccaaggccttctgctcggctcagggtaggggtccgggttcggcttccctgtggatatctgcagctgagcaggtgcagtgtcccctgtggccaccgtcccactcctgctccatcctccccacccccacctcacagtcaggcagatggaattcttttggcaggcggcacttgtggcccctgcctgcccagctggctccccttctggggtctgtagctgtctcaggtgcagctgaggccacaacgcaggagaagcggacatctgttctgatgaccggctgcctgcccctcccggtgcctccctgccccgtgaccctgaccagctagccacattgcttgtcttcctcaagtgccctgtgcccccagcttcgggctggacattcagagccagccacccaatgggctcagcgcaccccacccataggcagagtgaggtgggagctgaggggaagccgcccctgaggggccctgcccagcgcacctggtccggccagtgaccaatgtcgtgtttcgttcttttagatctaatgctggacgatgtaattgcttccggcagctcagccagcgctgcgtcaggtactgcgtctggggtgtgggctcatgcgtgtggggacatgctcttcactccctccccgtggctcattgattctatcctcttggggtgaaagggtgagggtccctggggcccccaagagggcaggggctgaagcgctgggctctgcagcatcccgcaggcctgcgccaaactggacgggaggcgagggcctgaggcctctctgccgacgccctttggagagcccaccttcccagcaagggcttccttggccggccaagctccccacctcctgccacctcttccctcctgtgcctcctccttgtagctcaccggtcgattattagagctgcaaatctctcctgtctccttttgtctgaggggagactttgatccaagggagcaggatgagaggagcagagaggggaaggatttgttttaaaaatgtaacaatgaataattgaacagactcattaatagtcaagtgatcacggtggctgcgtcatcgctacaaacagcaggaattgggaatcaaaggcctgagttggccacgagcttcttccaaaaaaagccaaagatttgggagtgacttgggtccttattttcaagagccatgtctctgggaagactctcctggtccagcccaccctccatggtccctcggtcccctgctctcctctcccccactggcccccagatggaggtgtggaggctcatggagtccgtggcagggctgtggggcctcataacactatgtctccagctggtggttcccaagctgttcatccccaaggcccccagttatcatctcctccaacagacttcacactttagaaggctgtctatgaagttaagagcacttcaataatgactttctttcatcatttttactaatcagaggcgcatctaattgctaatcacagcttctgagctgcagaaggttacacactaaatgatggcaaagaaagaccatttcgtcattaaattagtctgtggggccttaacacaggcaaagtatagggtttctttcaagctttttgaagtattggaaagaacataagggccgggcacagtggctcacacctgtaatcccagcactttgggaggctgaggcgggcagatcatgaggtcaggggtttgagaccagcctggccaacatggtgaaaccccgtctctactaaaaatacaaaaattagccgggcgtggtggcatacgcctgtaatcccagctactcgggaggctgaggcaggagaatcgcttcaacccgggaggcggaggttgcagtgagccgagatcacgccactgcactccagcctgggtgacagagcgagactccatttaaaaaaaaaaaaaaaaaaagagagagagagagtgagaacataaggacccccatggctgctgcaggcttggaacttcagtctgggaaccaccggctccactttccccactcctctggaagctagaatcaggcagatgctgccctggggatgttgggtgtcatgatctgtggggcctcagggacccacccaagagagaacccctgagcccccattgagtaggtcatccctgaggccctcagcgctatggccccatgatgctaagcagtggtgtttggcattgagagactgcctctctggggctcaggagtctctggctggtttgtgtctggattgccagggtccccacatctctgcatcaggctgtcttgcaaattcctgacttgttaggggatgaggggagggagggaagaagtggccttcagcttttcccttacgggcccacctggtctgtagactgaagtgtgcacactttcacactcaccccaaaacatcctagcacagggctagcccacagagacttttccaccttgggtgttatcccagaaatcaacacatgcagactctcatggctcctaagacgtgactcacccactcagtgctaaacactctcgtgacccttgcactgcactcccattccgggtaccttctgctgtgctcctgaagtggatagaccccactgtatcctggggtggcacacgcaggcatgtacaccagttaccttccctggctgttggtgaggactcagagaccccgaacaagggctcaggtcatcccatatcccacttcctaggacctggagttctgcgtggcctatgccagagcttttcaaacttccatgtgcataagaatcacctggaaagcataaacacagattcctggggcttaccccagaggttctcctacagcagtgcagatgcactgatctacccaccagggtgatggggacagagtcaaacgcagtccagggctgctgagaatcaaacacgtgcaccgcacctccctgctagcactcctgtcctggtgctgctcccagcaggggcgggagagccagaccctagggaaaggcagaagagcggagcctgtgattatctggggaatgggcctgaccagaagcctgggtccaccccggcttcccagatggagggagggaccggggctgctgggtcatcaggctgccccacgggacggctaagcctccaacaccagctccactctccttggccacctgtggcgtcgaccttcactcactcaccctctttccttccaccaggccgggacccagtgatcaggcctggccacggcagctgaaggtgtggcctctgccgtggggggcctgtgtccttgggagtgacccctgtcttctgcctactcattgccactcccctttgcaaaccctccgccctggccatgccttgggctccctgtgactcctactaactcactgcctgttgccttgcggccctccttctgtacccttcctccctccctgccccgaagtggggacctgggctgccctagatatgcccttccccccactgtctgactctggtattttctccacctaaggcagctcatcctggtgggaggcagggaggtggtgccacagctaccaatgcatcagtgaccacaggtccaggctcctcctggactatggttggagctctcaaagcagcaggcttgcccaaggctcctcccaggggctttctatttcttctccacacctgggtgcttgcctgcagagccgaggtccagagagcagcaaaggagggtggcatcgccaggccccaactttggaggcctttgggcagaccatccaggggtgtcctctgggccaaggcctcaaagccttgtgtctgtacccacctggcaactggcgagggactcgggctggaagttcgggtccagctcggtcatgcctcgtagctagctgaatgagtcactttttgcctggcttcattctctccctctgaaaaacaaaggggttgcccgaggagatgctgatcagattggcctggtactctttggacctgtgctctaatgggggatttctggcagcctcagcacctgccgtctggggtaggggccagggtggaggggtgtttgtacagacctcaggggccgggacctgtctataagcagatgccctgcctcagtcctcctgccccgccttccttctgggcctcttggaggagggtcccggctgaattgaagcccacccaccccacagactcctagtgcaaggccagagttggtgggagcagctgctccgtttggcctggaactgcctacagagtcaggctggggtgacggggagaggagggcaactctcccagcctctcctctacattgtctcagctaataatggggctaataaggagccgctttttctaacctaattgtattcaaacattttagttaattctccattcatattttagcataatgggatcgggtgctctcggcatttatggagattaatgcagagaaaatgttccggctgctcaggcaatgcagggcgactagcgccctctggttcttgtggtactcaaggaaggaaggaagaggcccggcccacccggcccaccctccaccatcgcggtgtggatgacccgtagcctcctgtcctcccttgccccaggctctccagccccacactcttggggctctgttctcgaacaaacagagccacagttggctggccgatctctgaaaacaggaagatggcctcatgcatgcctaaggcgcagcagagtgccggggactgtctgctccgtggtcatccacacctcaaggccgatgctggagagtggccaggtgggccaggagcatggcagcccacgaggctggatgtgcaatacctgggtgctcttcttccttcagcctcgggtgggggcccaccccaggccgctccttgcctcagtttacctctctgttcaatggtcctgtgcatgggaaaggacagttacatctgagctggcctgggcccaaagcttcctgctgcccctaagccagctaccccctggctcaggcctcagaggcggcagccctcactggctggcttccccctagacctcctgagacggggaagggctgtctgggacctgaggctgccacacacctccccgtgaaaagcctcttccttctctgtggcttcgtgggagaccaatctgtcaacttcctcccaagaacatgtgccccaagttggcctggcccttcctcagcacctggaagagggcccccctgaaatctcctgcccccagatttattctgcctccttggcagcccaaccttctggctctgtgattttcataactaagtggttcactaattacgagagaaatattatgcctctgacagatctcagacagtgcttccagcccagcctgcagtctaaggctgcccaaacacccaggagcaggctgggcagtgcctcattagaaactgggtgagtccaacaggtggggccctcccagcttgagtctgggatggagcagagccccaaggcctcccctcttgctctcactgacatgagggtacaggaggcccaggccccgccttctggaggccctctgggtgggtcagtgcagccagccaagaagatgtccaatttccaatctccggttttatctccaaatcccagctctgtgtaatctcctctgctcccccgaggggctgagcttggtgaaggagcaaaagcctttgcctccccgttgatggcgcgtcctctgagcctgaggagaccagttgtttttcatcgtatcgatctggccttgctgcggaacactgagtcgagggtgttatgaggggctggtggattttggaggctgcctaggggagggggctcacctggcgtctaatgtaggtggggggctctgcatgtcctgatccatcctgccctcaactgcagccagtacaacagatgcttggagggggacacgcccagacggctgcccccaccaaggggcagcgtggggagggcgaggatggtgatgattatggaatgtttcagttctggcgttagaggctggtggctgtgagggactgggggtggaggggtgcggggggcaggggcctgacgcttgctctgctcttccccctgccccatcagaagcccagtgcaaaccttactactccgactactcccgcttccggctcctcgtccaccacttgtgcaccagccactacctggacctcttcatcacaggtgtcatcgggctgaacgtggtcaccatggccatggagcactaccagcagccccaggtaggagcgagtggaccagccatctggcccccccacctccagctgaggaacctctgggcaaggttaacacagcctgagccagggtacctctgtgccaagcaagtgctaggcacactacatgggttcctcttgtgccccttggaggtgggtatcatctttgttttatagatgaggacactgaggctcagagatgttagttgatgtggccaaggtcacacagaaagggagtggaggacctggtttcttcatccagcaaatgttgagcgtctactatgagctgcgctctggatctttgagggtaaaaaggcagatggatgcctgcccttctggagttgagattctagcgaacgtccagctccagagctcacctgtgaccttgccacttctccagtcagcctcccttggctgccttccagccgtcggtttccctgtccatccaatgagggggttgaatttgtaatgcacaaggccccttccagtcctggcatgccgtgtcatctagtacattctcatgtgatctcctcaccatctcccaaggagaaagatcctttagcataaggttgattcattcatgtgaataagtgccctactcccttctggggtttggtggctaatggccagccatcatgatgggaacagagaagacagggctccttggagttcccctgcctctcagacctgggcggtatgatggaggggcggggggacaagccccagccctgggccttaagggaccctgcatcttgcccccatccctgccagattctggatgaggctctgaagatctgcaactacatcttcactgtcatctttgtcttggagtcagttttcaaacttgtggcctttggtttccgtcggttcttccaggacaggtaacggagaaaaggggggtcttggggacttgcgtagagatagaaaggaatgagtctcttggggaaatacccaggaagacctagtgtctaagacttttcttaattcctgaggttcagcccccaccctgtggctgacgtaggggactaggggatgggaaggcatggtctccaggaccaggagatgggaaggcatggagagaatttgacaagacagggcctgggggatgctggcagctagaaatcagtgtgacctagcctggggcttaagagcacagagcctggagccagactgcctgaactggatttgaatcctggtctcaccacttagtagctggtggccttgggtaagttacttaacctctctgtgcctcagtttcctcatttgtaaaatgagagaaaataatagtatccacatcacagagttgtgagattatgaattcctatttggttttgagggtgtttttcgttttgttttgttttgttttgttttctgatgcccaggctggagtgcagcagctcagtcatggctcacagcagccttgacctcctgagttcaagctgtcctttcacctcagtctcccaggtagctgggactacgggcacccactgccacacgcagctaattattttttatttttatttttagtagatacagggtctcactatgttgcccaggctgttctcgaactcctgagctcaagtgatcctcccacctcagactcccaaagtgttgggactgcaggtgtgagttcctatttgtaaagctcttaaaagtgcctggtgcatagtgaacaccatataagtgctaaattaaaaataaaagcaaatgaatacaaatgaaaagcagaggcttttgagctaaagtcctagtcctactcgtgccaccagttggctgtgtggccttagataagccacgcctcttctctgtgggatgggaggctggacccgctgatgtctgccctcctttcaagccctgtctttctgtgccacgactgccccctccttcaggaaccccctcccccaactcagggagctgtattctgggctttccaggtggaaccagctggacctggccattgtgctgctgtccatcatgggcatcacgctggaggaaatcgaggtcaacgcctcgctgcccatcaaccccaccatcatccgcatcatgagggtgctgcgcattgcccgaggttggtgcccagcccacgcacctgccctcctagggtgaccagcccagggagagagagcaagggtcggctttgtggctggtcaaggcctgggcggctgtgggttcccatgggtctttctcccagcttctgccaagggaggctggagacagggctgaggatggggatgcaacctggctggcccggagatggccatcccagcagccccagcccagccctggtcctgactctgccagctgtctggccggggacccaaagaggccagctcatgacgttgtcctgttctgcagtgctgaagctgctgaagatggctgtgggcatgcgggcgctgctggacacggtgatgcaggccctgccccaggtagccgggaggtggggggcctctggggagggggaggtgctttccagagggaaggggctcagagaagctgactgggagacccagcggcatcgtttctatttcttctccttttttccaggtggggaacctgggacttctcttcatgttgttgtttttcatctttgcagctctgggcgtggagctctttggagacctgggtgagttggggtaggggagggtggaggagccagggctggagaccagggggctcctggactaacatgggcctctccccctttccctcctcccccagagtgtgacgagacacacccctgtgagggcctgggccgtcatgccacctttcggaactttggcatggccttcctaaccctcttccgagtctccacaggtgacaattggaatggcattatgaaggtaagggcccagggttggcctaggctccagggaggcagccccacttcctgagctaggattccttgggaagatgaattggccacaaataaaagcatgtgaccttctctcccccgtgctagaacactctggaactccctctcccaggaacatgctctgactcacacttgtagtgctcctctgcccccaaacactccctcctcctccccttccttcccatcctccaatgctctgtgacaccagtgacctgattttccacaacagctccaacaactgtcctccccagcctcacccctctattccaccctccccaggacaccctccgggactgtgaccaggagtccacctgctacaacacggtcatctcgcctatctactttgtgtccttcgtgctgacggcccagttcgtgctagtcaacgtggtgatcgccgtgctgatgaagcacctggaggagagcaacaaggaggccaaggaggaggccgagctagaggctgagctggagctggagatgaagaccctcagcccccagccccactcgccactgggcagccccttcctctggcctggggtcgagggccccgacagccccgacagccccaagcctggggctctgcacccagcggcccacgcgagatcagcctcccacttttccctggagcaccccacggtgagcagacacccaccccagccgtgagaggagctggggcaggagaagggtgtggagggtggtgggcgggagccaagcgggcagcacacaaaccctaggctcctcctggaggctcccgccctccgtcctggatgctgagcgagcagtcactgcccctccccagggatggctgcccacactcaccccacagggccaccccagcagacgggccagcttagccatgccctgctcctccagcctggtctggcctccccttcctgactcataggttcaaggctaagttttctgtttccttcctgtttctttcttacccttgcccaactgccaaatctctttcctacccaccctttaacctgcctgattctcttccatctctccatccttttatcttctctttaccgctctctctctctccccccgccgtgggctctgctcattttccatctcccatctctccttcctccttcgccttccctcttccccaccccctcctctttttctctttgttgctgtgtgtgtttttgtgtgtgtgcacatgtgcatgtgtgttgtctgggtgtcacctctttctcctctgtttctcttgtcaatccccttccacgacacttcccatcactgccctctgacccctgctcccctgcctctccggctccccttacgggctggctccccaggacaggcagctgtttgacaccatatccctgctgatccagggctccctggagtgggagctgaagctgatggacgagctggcaggcccagggggccagccctctgccttcccttctgcccccagcctgggaggctccgacccacaggttactgtgcccctgtgctgtgccctctcccctgaccgtgctgggctgtgccacgctgtgccatgcttctggggaagctgggagtgttcctgcccactgggtatctgtagaaagtgcagccttggagcctcagttgagtgcaagaggcagtcaggggttcttctagactgagatcacctccagaaaagagctggaaggcagggctgctgagattgcccctctgatgagaagggtgtgtggaggaggagcttggggaggggagaggggatttgtaagaatctggaagagaaaagaggggatggggcagaagataagttagcagggggaccttagggggtggagggaaggaggtatcagatccagggaggaaggcctccagagacagtgtaggtggccagggagcccgctgccaagctgcagtctctctatctgctcgtgtccagcacacacttgccagtcctcagtttggtggctttttaagccatggagcccactgggcatggtgagtgctgtcaggagccactgatttctgtcctgagagagatagaaggctccagctgggagtggattttgagaacttggtgtgaaataggacttggcttcctgcccaagcccagccccttcccacagcgccacatggccctctcccccagtcccatttaattccaggtcttctgctttctgggctgttcctgccctcctcccctccccttgatcccctcaccacgacccactaccacgtgagagagggccccaccctccctccacctaggtgagaggctgcagacccggagtggagacaggtgtcagctgcagatagaaaagccgagtcctccagaggcccttttgggtggtggggcaggcaggttcttaggaagcctttagcctgatcccagaaaaatggacagtgatcctcatgtgggaagggaccttgcctcttgttgggattcagtctcagatctggcaatgacctagaatgatcagtgggaaagtgagtccctttccgaggcctccccttcctgaaagaggctcacagggaaaggttgtgggagaagaggacacgatgggaaggtgatggggttctgggagggacggtccaactgtcccctagcatcctgtgggcactgaggcaaccccctgggtcccaggtgagccagccagatggtgtggcagcccacccgagtgcgcccacttcaggctaacgggagaacatctcccagagcccaagttggagagggcgggcgggctgcaggcaggcggaggagggcccacgaggggagaagccagaatctgggggcaggccaagtcctgccaggctgttggaagccgagagaataggcagaaaacagccgtcagattggtggcattgtcgccggcgccccccgtgccgctctgtctgtgccgggaggagagacagtgctttgctggcctttcttcattttttttttttttggtatcatctttttgagagtcgcaagccctcggtcctcccgctccctccctgggtggtggtagtgtgggaggggctggggaggctcctggggtatctttagaatgcgtttctgtgtctcctcgctttgtcagtgtttgctctggctcttcagtgcctgccgcagcctctctgatcagagcagggggttgaagtgggtgcggggaggcactgtcagcttgtttggggaaagggtggggagagagaagggatgcctttttcccgcccccctgtgcttcgtgaaaagggggaagtggggactgagagagagcgcgtgtgtgcgtgtgcacgcgcgtgtgcgctgtcctggtttctcatgcctgatcatctctctccctgtctagatccctctagctgagatggaggctctgtctctgacgtcagagattgtgtctgaaccgtcctgctctctagctctgacggatgactctttgcctgatgacatgcacacactcttacttagtgccctggagagcaatgtacatacacactgccctcactgctcccggccacccccggggctggactggctgcagggctccagatcggcccagggagggtcctggggccgcctcctctcagtttgctgccaggctccacccagaggcatcaactgtcaggacctcggtggcccacgctttgctggcacaaggtcttcaggttccccactggggacaaagagattagataagtttaaattggggccttgccctgaagggtataggagcagcggcagccattatgaaaaagtgaatccagacacccaggagtgacacggcccaaaacaggtgtcatcagagtcaatctatgaatttggagccctgtgcaagccagccctccctgtgcctgttcccctcctccccaccccaccccaccccccaacaacatgagaccttcacaccacgtggtgggtgagagccgcatctctgccaccgctgccatgcccttcttcacttggagcgctgttcctgtctcctccgtcactgtccccgtgtgtccctgcgtcttcaccaaactcagtggggtgaatggggcttctctgtgctctgatagcttccctaccctttcccttctccagctcccgtcccttctgactgtgagcagccccctcctctccactgttcccctcctgttgtcagaggagggcccagctgaggcagggactggaccaccggctggggtgtccctaggggtcttgggtggctggcagtagtggagcctggggctgagaggggaagcaaaataagattgtcctccaacttagccatcctcaggcctgctggggctatttaactggctgggcctgcatggcgacagggcccctacagcctccctgggaacaaggggtgaagggttcagggggaagggggtcacagagtgatggagaaacctcttgagaacaaactaggctccctcatgctggagtccaaggctgagtacctcccttctctgaaacagagcaacaaccccactcccaccccgagtctgtccactaagggagcagctgaatttggcctccaccctcacctgccagagttattggttaaagtggaggtcagggagccagctgtgacatgcctctggtggtcatctgccattcaactcacctgaacccaacccaggccctgtgctgggacctggggctgctgtaagaactggatgaacagcctgcaacctgcaagctctcctgagctgcctggtccctgctccttgggagggtcctctccccctcacctcccccactgacagcacagggtcgtaggggctgctgttggcttttttttttttttttttttttgagacagggtctcactctgttgcctaggctggagtgcagtgatatgatcccagctcactatagctttgacccccccggctcaagcaatcctcccacctcagcctctggagtagctgggattacaggtgccacgccaccatatccagctaatttttttttttttttttttttttttttttttagaaatggggttttgccatgttgcccaggctggtctcaaactcctgagctcaagcgatctgcccaccttggcctcccaaagtgctgggattacaggcatgagccaccagccactgtgcctggcctgctgttagcttttaatcctcccctgagctgctctgggtcagggccccagcccatccctgtggacaccgggactcccttcagagcctctaaatggggcctttagaatcagcttgtgagccacctgcagggctgggggctgggggctgctctcccttctctggatacctccccgcccctccaccaccacagtgggagcttaaaggtgatacaatgtgtgcagttttgcagggggtggggggcagggcctgcagactctcccggctgcccagaccccctcctacctgcttcctccccgcgtgtggagggctcatccatgtgtctgcccctctccccagccatgctcatgcccatctctaccttgtcctgggagggcacgggggtgagggctgggcggggggcgctgctgctttctgttgtcagcgctgcctcagttaccaaacccacgcacaccctcttcctccacctccctcccctgttccttttgcagatgcagccccaccccacggagctgccaggaccagacttactgactgtgcggaagtctggggtcagccgaacgcactctctgcccaatgacagctacatgtgtcggcatgggagcactgccgaggggcccctgggacacaggggctgggggctccccaaagctcagtcaggtaccagggctagagcaggccaatttggctcacacagggagattccatcctggcctaagccagtcctgatctgaggggatggggaactgaggcagccaaagaggtatctctgacctcaggggagcctccagcctgggggaatggctttgagtccagggggtaagggtagaggccctgatgagggggagagagtggaagggagggctcaggtgagaacctgctcccctgaaccctccagctccattctctccccccacccctcccccgcttccctccctccacaggctccgtcttgtccgttcactcccagccagcagataccagctacatcctgcagcttcccaaagatgcacctcatctgctccagccccacagcgccccaacctggggcaccatccccaaactgcccccaccaggacgctcccctttggctcagaggccactcaggcgccaggtgagcagatgtggaaaggcaggcacaggcctgggggctggaccctctgctgctggtgatgacctgtgttgacactttcattcttccagcaaatatttattgtgtgccagtgatgtgccaggctcagttgcagataccagggacacagtactgggcaaagcagaagtggtctgtgccttcttgaaatttgcacccagttccttgttccactgaggaggcctggagaccagaaggggtagtgcttgcccagggtcatgcctatctggtcggaggtagaaccccagtctctggtctttccttcctcaccaaccagagctgcctcccaattcttctccccactttggactgagctatggggcacaaggcaggttttaagtgtcttcacttttggccaagcctagggcccaccttccagagcccagattcttttttttttttttttttttgagtttcgctcttgttgcccaggctggagtgcaatggcacaatcttggctccccgcaacctccgcctcctgggttcaagtgattctcctgcatcagcctcccgagtagctgggattacagacatgcgccaccatgcctggataattttgtatttttagtagagatggggtttctccatgttggtcaggctgagctcgagctcccaacctcagatgatctggccgcctcggccacccaaagtgccgggattacaggcgtgagccaccgcgcccggccccagagcccacctgtgataaggccacagcccatgccatgtgtgtgtcctgaggcatgagcgtggacacatgagaatctcaatcccacatgcttgggggagcaggcacagtccttattcattctgcaaatagtcactaagcagcctctgtgtgccaggcactggcgacacagcccctgccccctgaagctcacagtctaatagtggagacatgcctgccatcagatcattgcagcctcagctcacagctgccagacacctatgtgtggagggcagcagggacacagaaggggaaggggtcggttttacttggggacagagactgtcacacactgtgtcacagagaacctgagtccgtaaaatcgagggattcttgccaatcaggaagggtattcagagccaaaggggaagtctaggcagaggcggggaggcgtgaaggagccagctcagtgagcagagatggcctggcttctctcatatcccaggaggcaggggctgcagagagagcgattcttgcaggcttaggggagaccagagcatgggggagggaagacagggtttagtggggagagaggaggcatggtggacaacagaggtcaggctgcaatgacccctatctactagtaagagcggctaccaggacctctgcttaggatagtcctgctgtgcctggtggtggtgggcagggggcacagccagcttgacaggagggctagtccatgctggagaggagactgctgggctgagccctcccccaccccatataggcagcaataaggactgactccttggacgttcagggtctgggcagccgggaagacctgctggcagaggtgagtgggccctccccgcccctggcccgggcctactctttctggggccagtcaagtacccaggcacagcagcactcccgcagccacagcaagatctccaagcacatgaccccgccagccccttgcccaggcccagaacccaactggggcaagggccctccagagaccagaagcagcttagagttggacacggagctgagctggatttcaggagacctcctgccccctggcggccaggaggagcccccatccccacgggacctgaagaagtgctacagcgtggaggcccagagctgccagcgccggcctacgtcctggctggatgagcagaggagacactctatcgccgtcagctgcctggacagcggctcccaaccccacctgggcacagacccctctaaccttgggggccagcctcttggggggcctgggagccggcccaagaaaaaactcagcccgcctagtatcaccatagacccccccgagagccaaggtcctcggaccccgcccagccctggtatctgcctccggaggagggctccgtccagcgactccaaggatcccttggcctctggcccccctgacagcatggctgcctcgccctccccaaagaaagatgtgctgagtctctccggtttatcctctgacccagcagacctggacccctgagtcctgccccactttcccactcacctttctccactgggtgccaagtcctagctcctcctcctgggctatattcctgacaaaagttccatatagacaccaaggaggcggaggcgctcctccctgcctcagtggctctgggtacctgcaagcagaacttccaaagagagttaaaagcagcagccccggcaactctggctccaggcagaaggagaggcccggtgcagctgaggttcccgacaccagaagctgttgggagaaagcaatacgtttgtgcagaatctctatgtatattctattttattaaattaattgaatctagtatatgcgggatgtacgacattttgtgactgaagagacttgtttccttctacttttatgtgtctcagaatatttttgaggcgaaggcgtctgtctcttggctattttaacctaaaataacagtctagttatattccctcttcttgcaaagcacaagctgggaccgcgagcacattgcagccccaacggtggcccatcttcagcggagagcgagaaccattttggaaactgtaatgtaacttattttttcctttaacctcgtcatcattttctgtagggaaaaaaaaaagaaaaagaaaaaatgagattttacaagtgaaatggaacctttttatatatacatacatacatatctatctatctatctatatatatataaaataaagtaattttcctaaataaaaagctaatcacggtccagagtaaaagcaaaagggatggagagttaggcacgtccagatggcattgatgagagagagatcctggagatggggagtgggcggcggggagggaagcttcagggctgcctctttgtgtgtgtatgagtgtgtatgtgtttgtgtatatgagtgcgtgtgtgtatatgagtgtgagagtgtgtgtgtctgagagtgagagaacctgaaccccttgctgtggaaggctgcacctctagcctgccctccccagccgtgaaggagaggaggagcccctccgcctggtgcaggctggggaggcagggtctcttctgctgctatcaaagctttacagcttcctctagctaggcagctcagtgaatgggagtaattccagattaactcttatttctgctgacagctatcagccgcacattgaaagctggaaattggcataatgaagctgttttggttaatggggccgactgaggctgggggaggttgcctcagaggctgcagatctggatctgtgggttggtgggggaggggggaagtgtttctgggttttccttcctgaagcttcagcacggatttgccacacttctggctggatgcgtgacctgagctgtctggacttcagcctcctgccttgggggcgggcttagctgactggcattacaggcactgtccgatggggacctcgtccacctgcccgcaatggaattaaaccgtgtcaacggagtgggctgtgcttcctgaggatgagagtccagggctgggcgtccagaggcaacctcctggtggaggtggtagggtcagaggccaggtgctgagtggggagctggccccctgggcggtgatgagcgagcgctcaagatgtttacatgcactgctgctgctgcctgcctagcgggagccagtggaggagggaggtgtgaaggtggccaggggcaggcagacaggaagagggggagtggcgtggcccaggccacctgtctggtgctactgcagacaatattctcttgtctgaaatcttggtgccaagaggtggtgaccatgggtccagccagcctgtcacctagccacctcccaaacatctgtcccaatcccactcccttgaacagccccctcccctcgcccccagggccttcaaaccccaggattggattgggtttttgaaacctcagtggcaacgctcgctcacaaaccgtctgatccggtcaactgggagctgggggcaccaggctgccgggcgagtggacctggaggcgttgtccagcattgttttctaagctgggtgagagcttttctcattgctcttttggacagaactcataccgctccttgaagccaaagcctggttttatccttttagggtgtgcaataatgtcaaactttttcctctggcctccttgggtggggagagggagtgcttgtaggagctgccatttaagataaaaaaagcaaagctgtacaaaattcctagagttctgtcacctggatctgcagactaagcttttatatttttgtagaattctatagctgtctattccctaatgacgttggagggtatggggagggggttctgggatctttcattctcctagtggttagaagattctgggtcaaggtgaagccagagagctggactcctacccctccccactcttccagcaccccctctccccgctcccgaccaccagcccagcagcactagagtactggagagttgcttaggttgagtcttagcatgcctggttctttgtgcgttcctcttcccctggcctcctcttcccagtagggaccaaggaatttggggtgaacttactatgcttttgggttgctctgtagagatctgcagggaccagcccagtgaaaacaaaaaggttcccctattccctccccagcagccctctctgtggcctggagggtttctctggaagagggcagtgcctggaggggagcctctggatagtgatgtggaaatattaacaacagagtcaaagcgggtattttggggtagtcggggagaaaactgtgacctctccccccaatgatgtaaaatctttatcaatgatggaaactgttgtgtctcattaaaagggttttgaggtggaaaagcagctgccgctggatcttaataataatatcaaactgctaacctcatgctgcttgtctgggtggttatttgatgctgctctgggatacataaggggtgggggtagggggtggagaaaatgaaggaggctgggatggggagtggatggtgggggcagcaggtcttggatgaggactccaggggcagaatggaactggctaggggcttcagggatgtgggggcttttagaattaggaatatctaccctggtgcctttgtcctcagccttccccttcggggttcagaagaaattgtgacagcggctgtaggcccccacctcaagcttggctgtttctgcttcctccacccccaagactccaggaaaaggtctgtgtgggggtggggactgggaagaggagtgagctgagctggggataaaaacaaatctgaggctcatatgcagtctctcactcctcaacacaccctagcaagggaagtctgattgctatttctccatgaggcagcggggttcagagaggttaagtgaattgcccgtggtcacacagccaggagatggcagagctgagatttgaccctacgtctggccaacctccagcccacactactcctgtctcttctcagtgtggaggaaatggggcacgatgggaagaatcctgctcaaaaaatgacttgctggtgggcgcttttccaaagtagtcacattcacgttcatacaaatatgcacacgtgttccccgcatggcaaactcagaggcttagagaggcccccagcctcccacctggtgggccaccagcttttggccatagggaatggtggtgagaggagttcaatcacaggagaaggcatccctcagctccaggcgcttgtccaagagctggccaagggtagctctgcaatcactgtgggttcccaggctccacccttccgcagcataacgctgcccttgaaccccatggtacctgttcttttccccatcccgccttcttctctcttcctctcctctaaccctgccctacctaaacctcacccactttccaaacagctttcactcctatctccaccctagtccccacctgccacagcctggtgccccatggcctattttctcttcccttgggccagctgagcagcccgtggagtggggctggcaacagcagtgcaatgagggcatcagacaccaggtggcggcacagggcaccctcacctggtgccacctggtgcccctcctgcaaagggaccaagccagggagagggcaccaacaccgatggacaccttctagggacaggtgccctgtataacctcagaaggaggaagcaggcctgcagggcccagtgaaggactttgtgtatggagaagcccaaacaggaatccccgccatctgagtgctgagcccacggtgttcaatatcccttggctaaagctaggagactcagggctaatccaggacaatggttgccaggagggaaacgaactctcaaagcaagttgagttgtggcctggagtcccactccagggcacagcaaggcaggtcaaggaggcagctgctccagctaagccccaaaagggaattctgctaagaattttgaaactgtgtgtcttagccttggttccaggtgtgggatctgcgaactgtggcccacagagctaattaattcttcttgctttgaaaactccagaattgggcacagcagccagcactctcccctgcatgccaaatcagatcaagtgcaggttggcggcagaggggcagcctcactgagggccatgagtggggccagtggggccaccattaggctggggtctggaggaagcagaccccacttcaggggagaggacaagggggaggctggggcgtgggagctgcagcctggtttgggggtgctccaagcctccaaggagccgcaaggggctaaaaggaatcaggcagtgcttggaggggaagctttgctattccacaccctgcccctctgtcttgtcagttccaacctgcctctctcccttcggagcatttcctgtgcctgggtctccccattgcccccattctgctttcttctctctgctgtcatgcttgctctgagctgtaccttgcaattattttatctttccatctccttgccaggaaatccttgacgccgggttcccctgggacactcactgcgggggaggcaccgcacatgctccatccatcctgcctggagcagcagtcagttggggagggaggatggggcttgggccatgaaggctgggggaggtttggtccatttctctgctgcagcccaacccacaaggccgttactgcttctccggagcccttccagcaagaaccatcttggttctgaacactcaaaagcaaagtgggcagtgcccactgctgggactgtacttaatgccacagtggccttgttacctatgactccttcttaggaaatgaggtgtttgcttaatcagtcaacaacacttcctgaggaccaacttctccaggcactgtcctgggtgctgaggatacagtgataaacaaacttcagtccctaccctcaaggtgtccacagtcctctgggggaggtaagcaagacatcagtgattacaagtgggggaagcctcctagcccaggactgggttggggaggtccaaggaaggctttgacggggaggggggcttgagcgaactcttgaagaagtttgccacttgcagaaagggaggtagggtgtaggtaggagagtgcaccaagcagccttgaagacagatacaggaagtgcatcccgctcaaggagactgcgcagaaacagtctcctcggcagacgtggggcgcctcctgcgtgtgctgggataagctctgtggcgctgagcaagctgtagggtgtctcagggcctcagatttcttgctctggtgagaacaaccaaaacaataacatcctagaaatattgtggttattattcaagggctctgtgaaaggggacacacttcctgagtggcctggaggggtaaagccccaatacctcaagagagatgggggaaggtgaggatcgctaagggcccccaccacgccctcagagtgcccaacccagtgctatagccttgggaaagcaatagcgatagaaaagcctggggctgcaagggatggtgcttcagctccgatgctgaagccagaacccaagggtcctagcccaaaactagagctccagccagtgcactgcctggccaactgtggggctggaaagtcccggacggaagctcaggctagttctgggctctccatctcagaaaggaggtctgattggggagctcacctcccaaagggccctaaaggaaagtccccaggtctcctcaagcccagagcaatctggtgcctatgaccccacaagccctagaaaaggaatgggagaggagggagagttggaggaagccggtgggtagacaaggtcaaaacacaggggcagtgggtgctgatgaagccatgaccagggtcatggaaggggtggaggaaggttcccagctgcctaggccatagaagcctggcccaccagggctggaagagagcttagatatcaccctgtccacgtttctcaagaaatgaagtcccagaggcatcaaggagcttattgagatcacacagtgtataaaaggtatggagggggattggaggggactgagttagtccctgcccttggggacctctcagattagcagggaagacagactcttcataactaaatataatccaaggcacgccgtaacaaggtgtaaagctctgtaaagtattttgcccagagatgaaggtagggggacaggagagggagggtatgtgtggatgagtggaaaggaagagggcagacaaagaaggggctgaaagaacttgcccagtggaggggtagaagtccctggtctgactgcctgggaaaggggaatcttctccactcccacccctatcccatgcccagccagatcttggttctgatagcctatagccaaggagacttcccttctagtgacctcctggctgcccagagagataggaggtggcttgccccttctgcactcttactggctcccacccacacctgccgctgagcagccaaggaaggaaacaccttctcttgagaacaagggccagaaaaggggtcaccggggtgaaactggacagacctgtgggcaaaggcagggaagagaagggccagggaaagatttgccagggagaattccttctgagccccaacaagcggtgctgagttggcgtctgggattgtgttaaggaagacagggcaacagcgggattgagagatggagggatccccgcatctgaggggataccgggagaaggagagctgaggcaagcaggagaaggagagcactgacaagcccattttacagatcaggaatgtagagtttcagccttaggaggaggacgaggacgaggacactcacgtggggctcctcctggggcttcacctgtccttccccccccaaccctgatcaggctgaagcagagggaattcacacatgttgggtgcccactaagtgtgccaggaaatacgctttgcctaccctttccattcaatcctcagagaaccctgggaggaagattctcttctatgattgtctctattttacggatgtgaaagtagaggcccagagacgtgccgaggtgatgtggcaaggtcagggagccacagagcctaagagggcagcagtttaagaggacataagaggcccccgctggacgatgctgcggcccccacccccgcctcacgggtacacacccgcggagcacaccccgtgtgctccccgtgtggcgcctgccagtggtctctggaacctgatggggaagaggtcagcttcctgattgagcacagaagcccttcccattttacagatgaggaaactgacctccggagaggaacgtgaccttctcaaagattccttttttactaggaaagattgttaaatccctctccctacgtcccctactcaatgactcatcggccccacggacttgttcgggagtgggagcgcctgtgtatcccagttcccccttggaaatagactcgactcctggactgttagcctcggtatttagagagacatccccctggcttggcccaggggccgctcgcaggggctgtcgccgtgccaagggcccccccacctctgccccaaagtccctcccagggaggcgctgtcgcaacccgcgggacgggggcagggagaccggacccagaggcactggggtagggctcggcagggcgggtccgggcggagcgcggggtgcggagggcggaggcggctccggcgcccgctctgcccgccgctgggtccgaccgcgctcgccttccttgcagccgcgcctcggccccatggacgccctgtgcggttccggggagctcggctccaagttctgggtaaggcgcggggctccggggtcactgcgcgggggccagggtcggccggcttcgcccggtccccgccgcctgccttcccgcggggccggcaggtatcccgggacggagcccctgagacggcctgggcgcccgggagggggcgatgggctcgggagggaggttggctgcgccgcccggagccgggtcccacgcggtgtcggggacctgccctgctctgcccttcccggctgcagcactggggagcccgggaaagtgaggaagagtgcgcggctggggcgcaaaggcacagtgcgtggctgggtgagtcggctccatcccagcccctccgtcgggtgcggaaggggcgtttcgcaatcagccgcgggttcctgatggagggtcttccctcagcatctgcctcaggttaggactcggttgcccacctgggcatggattgcccccagggcatccagagcacctgctcaaccaggtgttttgggaggccggctgtgcagtgtcccacccttcttaggaaggtttcctgccaccttcttttctctaggtaagactgaggtctgagagcaggccatccccaccactccggactcagaagggagaagcagaccccagtctggagacaggtgcagggtgtcaggattcctgtagtccaactcccttctcacagatggagaaagggaggcccagagagaggaagggacttgcccaaagttacccagttcaatgaaggcagagctgggatagaaaaacaggctacaggccaggtgcagtggttcacgcctgtaatcccaccctttgggaggcagaggtgggaggatcacttcagcccaggagttttagattactgtgagctatgatcgcaccactgcactgtggcctgggcgaaagagtgagaccctgtctctaaaaaaataaataaataagaaaagaaaatcaagcctttggtgactctcactccaaatctctttctaagacaggctgctcttcagcctgctgactccagcctccagcacagttcaggtgagctaagtgcatacagcctaggagctttcttaccaacttgcaaaacttacttgcctctatgaggcaagtgatcatgtggtctccgttttacagagggagctcagattaaaggtgcttctctgtggtcattaaaggggtgtccagggcttgtgaatcccaatctctaagtcttttcctattttgagtatttgtacatatatgccctttgtgtgtgtacgcacacacgcaggcacgtggggtgttacccaagagttcgtgctgtgcacgtgtgtgcacaggtgtataagtctggagctatgctcttgggctgtgtttagaatgggctgaaggcgttatatggattttttgaaacttggggcaatggaggtaaaaaaaaaaactgtaaaaaggcatatttgggattctctctttttctgtgggtgacccaaaggttaatccgagatggtgcaacttctctgccactgcccttctttcccagtcccacaggaacttcatgtattattcagcatggacaggccacttgccaccagggtccagaggttgtgcctttgcctcatgagcacacttcctttcactgccctttgggccaggctggtatgaccgtggcaggtttgtggtgcctgggatgccaaacagaaaatcaagagggtagttgtgcccaagcttcaggcacaagggctcattgttcctgggtagcctcctgaaccctgagagcttaggactctacagagacaggtctcctggaccccagagttgggaaattcaggactccctttttgtcccatgttcagacatcctctggctctaccttaacatgggattgtggaatccaagaaagtgggagcttgggagtttgaagcagcgagtccaacccctcagtgtagagctggggaaactgaggccaagggagtgaaggtcacaggacaatcaaagacagagtgctgggctgggaaaccggaccccggggctgtggttacagggttgccattgcctggctgtgagcctttgagcctctgggccctctggcccgcgcacttctccttgatgctcgtgagctatacacacctcctctgaggatgcaggctcagtgggagtcagctcatctacattatgaagccctcgtgagatctctgcttggataccttaaatggcaaactgaccaccccccttcccaccccaatctctaaacatctttcacattctcttctggctcctgaaagctgttccaggctgcacccagtgtggctggtgactggggaaggagcgtggagagagaaaggaggctcccagctcatcctctgagggaatgacagggtttgtacagctgaaaggagagagagtctacactggaagctggatcctctgccacagcctaattacaaaaaaggcctggagttctgggctgttcatttgtgatgtgctgtgttgcatctcatttgcatggtgtattattaaggcacaactccccctgaacctttaccttaggggcctgtgggtgacccactttgtgggaagtggttcagggcagcccggaagtacctgaactaggagtgaaaatgcaaggagggggtggggtgttcaggcccctctgggccgctcatttaatctaccaagatgctcagtagctcatccttatagcttcagtttctccaccagtggaatgggaaataacccaacccctacccacctcacaagatttttctgatcaaatgagacagggaatgtggaatgattttaagaactaagaagttttctatgggtggcaagttctgacattccccggaagagggaggagaaagaaaaatggggttagaagaaaatgtcagacgtgggaagacctgcagggaaagagctggtagggctgtcgggccagtggctcccatttcagctgtttgctggggagctgggagctgttcctggctcagtctgagggtaggagactggagaggaccatgccccttgggacatgtgtacacacatctgtgtactcacacaccacctgccaggtgaatgatttgtgtgaatccttctctctctcacccatatcgactttgaagcaggttaccaacttccctgaatgtgccttgggagtttttgtggaaataaattccaaaagagtgaactgtgtaattaaaccacctcactactcaggaggccagaggtgcctcagaacaagggaggaggtgggatcctctgcctgcaggattcctctctgttctgaaccacagaggttgggagcacctgggtggtgaagggagtatgtggaggaagggcctggaggtatttaccccccgccagataaacacctgttggcagaattagccttgatctgacagccccaggaagcttagaaatctgaagatcctgaccatgaaagccatccaaagatggcaaggaccgcctgagaagtagtgagctccctgtcactggggggtatgtaaggacatggttagtgactgcttggcggagatgctggagagaggattcaagccaggaaagaaggtggggtcctgagattctgtgactgggtagagggaagatgcggccagtggggattcattagttcctcctctgagatttctggactcctccttccctggctctctccctgctctacatacggaatttgcctagaagcagctcttggtagaggcctctgggtctccccttggttaggcccacatgggaaaggtgacctcattgttcccttagctgtttacccatcctagggaggggcagatccctggtcccttggaggctcagctccctgtgtctcctgctctgttttagctagccccaattctgctattcaccagctgtgtgactttgggcaaatgactcaccttctctgggctccagcagggctgaggtgggctctggggcctgcttcaggtctggagttgcccaattttggaaggatgagccttgggcttgggggcgaaggctatgcatgattagggcccttcaaagcttagagctcctgggtatcagggtctcctctgccttcttagtaggcagccacaaaaatgtatgagtaatgggcaaggctcctatgccaatgtattttgactcacaaatgaagacagtgtcctgcacatccatggggaagctgagtgggaggtagacactcctccgcttagcagacaccatagctcaccctcccctcaggaacccagtcctccctgcaaggccagagctcccggggctcctttcctccatctcagctgctgcaagcaaacccagtgctggatggctttgacctctgagctcttggcttctggctacggcatttcattgcttgtggcctcaggctggcttctcctcaatcctgctgttcccccacttcacctgggccttaggtccctgagggccagagagatacggggaaggaagtgagtcagggaagtggcattcaggagggagctttgccaagcccgcctgtagtccccagacagggaaatggtcttgaaacactgggcaggcttccagggaggaaggacttggcagggatgaccagctgagccaccccggagtagggccagagcacccggactgtattcagtcctctccattggggcaggatccctggggagttgggggtgaaatgagacctggtatgccattgctggggtggctgggcccctccccttcccgaactgaagttgtttctgtttctggtactgcggtgcagtggttggggctggcagggggcagggtgggatagtgaatgagagcctaactctaggcttggattttggatttctccttttttttttttttgtgacagagtcttgctctgtcgcccaggctgaagtgcagtagcacaatctcaactcactgcaacctccacctcccaggttcaagcaatcctcctgcctcagcctcccaagtagctgggattacaggtgcacaccaccatgcccggctaatttttgtatttttagtagagacggggtttcaccatgatggccaggctggtctcaaattcctgacctcaagtcatctgcccacctcagcctcctaaagtgctgggattacaggcgtgagccaccgcattcagccagatttctcctaactggatattcaggtttctagtcaggggctcccagaaccccagctaggccactacccaggtgttagccgctctgctccctcagctctgtgagaataattgcaaaaagcaggtgatatgagaatgggctgcatggctgaaaggtgatctgggtgcaagtgctctatccccagggtgggacatcatgccggagtcctaccaggtgtacaggaaacactaatcctgtgggaaggagctgggccctggaacaaaactctctgggtctaatcccagcatcagccctgggtgtcagctgtcatgagcgtgaaatgatcatcctggcccacagcaggagctcagtgaaccaaagccccttccagaagcacattggccagttgagcccgtgagccatccctgcaaggggccagcaggcgcagcacaaccagtttttgtttgtttgtttgttgtgttgtgttgtgtttttgagaaggagtctcgctctgccaccctggctggagtgcagtggcgtgatctcagctcactgcaacctccgcctcccaggttcaaacaattatcctgcctcagcctcctgagtagctgggattacaggcatgcgccaccatgcctagataatttttttaaatatttttagtagagacagcgtttcgtcatgttggccaggctggtcgcagactcctgacctcaggggacccaccctcctcggcctcccaaagtgctgggattacagcacagccagtttttgacccctgcccccaggccttccaaaggctgagggagggtgagtggggatcagcacgtgtccttgctctctccacgccttcattgctgctgagtcaatggtcttgtctgttcatcccttccctatctgggacttcaggagctgccctgcagtggtggcttccttctccagtaccacacaggaatagggaagtaatgactcttctcatgacagagactgtcaacaggcctggggcccccagggcttgggaagtccctggcaaagctggggcagagggctccggggtcctcaccccccgcccccatcgcctgtatgagtctgcagtgatttcagcttcagtgaccatgaagtctgccatgagggggcctctgccacgtggtccattctggatgtgggaccttaccccttatcagccccatccagctgtttaatcgcattattaaggaagctgttgttgctgtggaaactgtgtgggtgatggtgggggagggggctgtgggctcagctctcacctcccagcagtgctcttcagagcgggaatgagaggagagccttgagtagggatcgtcatcctgccctgcagggattcagggagtgttacagggtccagggaataaccttcactggccctgtcctcaccttcattttacacataactgagttggagacccttctgggtgccaagaactgtggccttggtaccagggagagaacactgtgttcctgggcatgaagctgcagaggctgcggctggagttggcaccctccatttatctattcatttgtttattcattcttttgttcaatagatggttattgagtaccttctctgtgccaggccctgctctaagcaacaggaaataccatcaactgcagaatacagagctaaagaatctgtcttcgtggagcatatactctagtgggaagaggcagtaaaacaagaatcataaaggccaggtgcagtggctcatgcctgtaatcccagcactttgggaggccgaagcaggaggatcacttgagcccagaagttcgagaccagtctgggccacatagtgggaccccatctctacaaaaaaattaaaaaattagctgggcgtggtggcacatgcctgtagtcccagctactcaggaggctgaggcaggaggatcgcttgagcccaagaggtcaagattacagtggggaaaaaaaaaaaaaaagaacagttgaatgtggcactgtcatgccgttcaacctgtaatttgaaggtagaatggacagggtttgctgagagaccggatgtgggatgtgagagaaagagaagaatcaggggcaactccaaggactctggtctgggaagagagacaggaggaaggaactgccatccccgggccaggcaggctagaaaggcagggacggccaagagctcagttctggacgtgttttgtatgacgtgtcccatagttgatgtcctagctcagggtctggagtgaaccaaatagggagttaggggtgagggcctgtgtgggcgggtaccccctgcctcctagggagggccctgcccaggtgggacatgcttatctcaaggaaaggagcccaggctgaatgcccttgagggtcaaagcagccacccagttctcacagccccaaagtcccctggttgttgccacagagcaggtgtctgcgaaaccaaaacacgggcctgacagctggaggctccatcacccgcttccctgagtgttgtcccgttgccatcgaagtgctttgctgttcattctccctcaccttctccccgctgtggggaggtgaccagatgctgtcatcactcccattactcacaggtggagactgaggttcaagggcacgaaggggctcaccaacagttgcatggctcaaaagtggcagaagccatcctggattctccgcatcggggttgggttcttcctgtggccactccccacccgccttacagagccatgccaccggcctgcaagtgcacacagcgattcccaccatgtccccacgcctgggctcctgtcctcaacatgcacactcccttgtgagtcaatggccccgtgtggcatcacaaagcctgggtgcctgtcccggccacacactgctgggtgtccttgaacctgttgccaaagtgggtgtagtttctcttttgtacactgggcctaacagtgcccctcctatatacccctggaagttgttctgagacaacatccagataacaactaggtaagtgcagtaataaaatgcgggagaaacattaggggcctttattttcctcacttaactggctgccagggaaaagcaaggaaaggtcagaggctggggtgccccagagaggccccatgtagatgaggctctggctgggcccagagaaatgggatgtacactccggcccagagacctgaagatctgggttcagggcagctttgggacaggctatctggatggcaactaactggagtacctgatcaggcctagaggtgtgtcctgtgacccagtgtccaggcctgggccagcatgtcagagactcagcaagagtatgtgggtccttggctcacattgtttgagcaactactgaatactgaataggactactgaatactgaatactgaataggacaagatgtacatggtacaacttctgcccacctgggccttcaatgaaatgcccccaggcagcatgtccctgactgcatgcttcacagagcagggataggcctgcccaacgtgccactgtatctgcagaacccagcccactgcctgactcaccaaggccctcaccaaacattgtcaaggccaagagtgacgctccagggaaggggatctctctaggaggaagggtgctcaagatgaagaaggtgggttttcagccaggcctgtcacccctccctggagtggttaggttaggattttgacaagtggtaaaaagagggactaggttgagcaagggggtaggagcaagaatctcagagcagatttaggatgaagtgagttggctgtgggggaagggagcaatgggaaaggaggtgggaggagatgccatggggggggtcttgaggaccaggttgggtgctaggatgtggcttcatgagcagcaggagtcactgcaggtttgtgggcatgaggcaagaggcacaaagctgtattttgggaagagccatctcgcaggtgggcaggggcactggagggcagagggctgccccagatgggattaagaagggaaggcaggccaggcacagtggctcacgcctgaaatcctggcactttgggaggctgaggcgggcggatcacaaggtcaggagttcgagaccagcctgaccaacacggtgaaaccccgtctctactaaaaatacaaaaattagctgggcgtggtggcgggcatctgtaatcccagctactcaggaggctgaggcaggagaatcatttgaacccgggaggtggaggttgcagtgagccaaggtcacaccactgcactccagcctgggtgacagagccagactccgtctcaaaaaaaaaaaaaaaaaaaaaaggaagaagggaaggcaggctggggaggttggggaaaggaagcagggagtgcagatcactccccttccatgagttgttttcttaagatgctagaacttggccaggcatggtggctcacccctgtaatcccagcactttgggaggctgaggctggcagatcacttgaggtcaggagttccagaccagcctggccaacatggtgaaaccccatctctactaataatacaaaatttagctgggtgtggtggtgtgcacctgtggtcctagctacttgggaggctgagacaggagaatcacttgaaccctggaggcacaggttgcagagagctgagatcgtgccactgcactccagccgaggtgacagagtgagactccgtctcaaaaccaaaacaaaacaaaaaccaaggccgggtgcagtggctcatgcctgtaatcccagcactttgggaggccgaggtgggcagatcacaaggtcaggagatcgagaccatcctcgctaacacggtaaaaccccgtctctactaaaaatacaaaaaattagacgggcatggtggcgggcgcctgtagtctcagccaatcaggaggctgaggcaggagaatggcgtgaacccgggaggcggagcttgcagtgagccgagatcacgccactgcactccagcctgggcgacagagcgagactccgtctcaaaaacaagcaaacaaaaaaacagaaaacaaaaattagcctggcgtagtggcatgtgcctgtaattccagctacccaggaggctgaggtgggagaatcgcttgaaccctggaggcagaggttgcagtgagccaaggtcgcaccactgcactccagcctgggtgacagagcgagacttggccttaaaaaaaaaaaaaaaagaaagaaattaaccagccgtggtggtgcacgcccgtaatcccagctactcagaaggctgaggcacgagaatcacttgaacacgggaggcagaggttgcagtaagccaagattgtgccactgccctccagcctgggcgacagagcaagattccatcaaaaaaaaaaaaaaaaaaaaaaaaaaaagatgggagaactcagaactcaagcatatagattattcaacagttcacatagccagatagttcaaggccagctgtgggctttgaatgccatagtaaaatgtttgaactttgccttctaggcagtagggagctactgaaagtttaaagggatggtatactattattctttcattcatttattcaataaacgtgtatgtgtgtgtgtgtattttttttttaagagtccaggtcttgctctgttgctcaggctagagtggagtggcataatcatggctcactgcagcaacaaactcccgggctcaagagatcctcccgccttagcctccatgtaactgggactacaggtgcctgtcaccagaccaggctaatgttttacatttttgtagagacagcgtcttgctatgttgcccaggctggtctcaaactcctggcctcaagtgatgctcctgccttggcctctcaaagcactgggcaatgtccctggtcttcaataaatatttgatttatttaagcaaatcttttttctgagcacctactatgtgctaggcaccattctaagtacttaggatacatagataaataaaataaaggttcttcccttcaaagagcttacatgtcagcaagtaaaggaaaagatgagagaaaatataataaatcagtaaattatatatcatgtcaaaaggtgataggtgttatagagaaaagaaaaagcggagaagggtgggagaattgggaatacaggggtgggacacaggtggcagtattaaacaggatggtcagggtaggcttcattgagaaagaaagacttcaggatgtctgggggaggagtgttccaggaagagagaagagcaagtgcaaaggccctgagacaggagcagcaagtgcatttagaaacagcaaggaggccagtggctggagtgaagcaggaaaggcggggagagggtcatgggttgggggaagggacattgtgcaggtctatgcaggctattgtagggtgtatggagtgaagatgtcaagtcagcagttagatatggagctggagatttggggagcaatgagctggagagatagacttgaaagtcattggcatatagatggtacatcatatcatcatatgagactgcatgggattgccaagaggttgagtgcagataggaaggaggcagagaagaggaaaggactgagctccaggaccctcttgcaccaggcaggggaatcagcaaagagactgtgatggcatggccagaaaggaaggggaaaaccatgcaggatctgggaccccagggaatctgaagggaagagaccagaagtctatggcaattgctcatgaagagatgagggtctggccaaggggccaggtgggaggaaccaggtaagagatattatcatcccaatgttacccttaaagaaaccaaggcccagagaggggagaggttaagaacctgggtcaagatcacacagcttaagtgtgacttcttctttttattttttatttttttgagacggagtctccctctgtcaccaggctggagtgcagtggcacaatctcagctcactgcaacctccgcctcccgggttcaaacagttcacctgcctcagcctcccgagtagctgggattacaggtgcctgccaccacgcccagctaatttttgtatttttagtagagacgggatttcaccatgttggtcaggctggtctcgaactcctgacctcgtgatcttcccacctcagcctcccaaagagctgggattacaggtgtaagccattgtgcccggccaagtgtgagttcttttaagctgtgtgaccttggccaaggtgcttaacctttccctgccaagtctcaaacacctctttgtccagctactatgcttccatcaagaatcaataggacctatgtccctacaggtgtcagggtagctggcagaatggtgatgcccttggcagaggcaggcaaggccaaaggaagggctggttctggcagggagtgaaggatcttactttgagaggtattgaatatgaggtggctgcagacagatggtgacgccatctgagaggcagcaggaagtaggcgctgaggctcaggaggtgatttgagctgttgatctggatttgggactcctcaggacaatctgtgaacaatgatgagagagagcaccaaggaccaaggtctgaacttgggagctagggcccatgtccacagggtgaactggaaggaagataaggagacagcaaggaatgcttgccaagaaaccaggagaccaggaaagagtagtttccaagagatgggggaagcccacactgttgcagggaggtcctgcataaagtctgaaacgggtctatttaattcgcccttggaggctgggcatggtgtctcacacctgtaatcccagcactttgggaggccaaggcgggtggatgacctgaggtcaagagtttgagaaccagcctggtcaacatggcaaaaccccgtctgtactaaaaatacaaaaattggccgggcgtggtggtggaagcctgtaatcccagctactcgggaggctgaggcaggagaatcacctgaatcccagaggcggaggttgctgtgagctgagatcacaccactgcacaccagcctgggagacagagcaagactctgcccaaaagaaaaaaaaaaattgtagttggaaggacttctggttctatagggtggattgaacacaagactttatctccagtccttcctgattttccatcaaagtgacagtaaggaataaagaatgtaaacctacaaggacaaagagaagaggagacaacagcagacaagatattaacacctttttggaaagtgagaaacaggttgaggagtgatcactgacacagcagagaacaactgaaaccaaaggccatttggagtctgtaaaagctcggggattggagggctgaaggaggcaaggggaagagcagggctgaaagcagcggctgctaggagaatgcataaggagagatgaaacacccaagatacttatccatctcctctcaaagccaggcaaattccagccacctcacagaagaccagcagtttattctgtggaattaagtaaaagtctgcatactgaaggatagaaccctcagccctcactcctaaattggtcccagagaaaagacctccagattcttccagttgttgggggagtcttccctaaaggaccaggttcctacttgatcactctgcagtgaagcccaacagccaataagcttggtcctcggtactctgtcttcagtagctgtttcttggtccttggtccttggtactctcactcatcattgttcacagattgccctgaggagtcccagatccagtcccaaatccacctgcccccaacacacagagcagccaactctttagtgtcttactccaaaatattgagacagccaagccgcaagaatcaccacaggtcgggtgcagtgactcacgcctgtaatcccagcactttgggaggccgaggcaggcggatcacttgaagtcaggagttcgagaccagcctggccaacatggcaaaacccctctactaaaaatacaaaaattagctgggcattgtgacacgtgcctgtaatcccagctactcgggaggctgaggcaggagaatttcttgaacctcagaggcagaggttgcagtgagctgagatcgtactaccacactccagcctgggcgacagagggagactccatctcaaaaaaaaaaaaaaaaagtcaccacacatttgaggaaaaattctgttaaaataaaaactttagacaaattaaatttagcagagtttatctgagcaaagaacaattcatgaatcagccagcatcctgaaccagtagaggttcacagagttttaccacccagcagtatgggcaggcagtattaatggacagagaaaggaattgatgtatagaaacagcttgattggcgacagatcagtatttgccttatttgggcatggtgcaatgaggtgtttgccttatgtggacatgttctgatgatctggcagcttgtgattggctgaaaattctgctatatttggctgagacttggctgcttattgtaagaatatactctcaagttacgttgcagtttgtttacatattgaattatgctacagtccactatgtatggagtcagctttatacctgggtgacagagtgagactttgtcaaaaaaagaaggagaggagaggagagagaggagagagatgaggggtggggaggggaagggaggaaaggagaaaggaaggaaggaaagaaggaagggagggagggaagggaaggagggagggaagaagggaaagaaagaaggaaggaaggaaggaagaaagagagagagagaaaggaaggaaggaaggaaataggcaacacataaaataaatttttttaataggatcacaggtcactgtgaacaatagccgttcattaaatgacttcggaggcatatacaaaaagttacatagttgtagaaaaagcttagctgttttaatagcgagttctcagttttcttaagtgatcaaaaacctaacaaagacagcatgaagcacaggaaattatctgggtagaacacagaatctttgttttctaggccaactacctaaagagaaagaaaaacattttacaatttcctattatgatcagaccaataatctaagaacaccatgttgttttaatggagagaaccaaattctagttttgcatcagtgtaattttgatattaatgctagctcttatcgcccaggctggagtgcaatggtgcaatctctgcttactgcaacctccgcctcccgggttcaagtgattctcctgcctcagcctctcaagtagctgggattacaggcgcctgccaccacacccggcttattttttgtatttttagtagagatggggtttcaccatgttggccaggctgggctcgaactcctgacctcaagtgatccacccgcctctgcctcccaaagtcctgggattacaggcgtgagccactgcacccggtcgctaacttttattcttaaaaaacttgtaaataattacctcctaatcttaaccagcttgatcacccataaaatttctttcacaagattcatcttccacaaacctcctacaactcttatatccattcactttttgtcctatactttcctcttctcattttcgaaaaatcagtcatttcactttaggacaaaatttattctctttttccgttatcaaaacaaaacatcctcacgtcttatagcttttccttagcttcctttgtatatttctttttcatatattcctttttcttaccttccttgtatattttcatatagattttcccccttattgtttctagtaattgtagctacatatattaattagaattcttaaccccggccaggtacagtggctcatgcctgtaatcccagcactttggagtccgaggtaggcagatcacttgagggcagaagttcaagaccggcctggctgacatgctgaaaccctgtctctattaaaaatacaaaaattggctgggcgtggtggcgggcacctgtaatcccagctactggggaggctcaggcaggagaattacctgaacccaggaggtggaggttgcagtgagtcaagattgagccactgcactccagcctgggtgacagcgcgagactccatctcagaaaaaaaaaaaaaaaaaaagaattcttaacccttagtgaccttaatttccatggacattagaaagtaagcatttgtgaattgtgtgtcacaccagctgtagattggtaaatctatgaaccataatgtctagaagcatgagctttctcatagtacaatttgtcagtgtggcacagaacatgtttctcaatggtccaaaatgtctttaagtctctctgtaaaaataaactgtaaaggaggcaaaatttcatttgtatccctttaggttttttgtttgtttgttttgtgaggcctgaaaactaaattgttgtttgtacagatttccctcctcctcaactttctattcttgatgctaagagtgttaaaaccttctggtggctgagcgtggtggctcacgcctgtaatcctagcactttgggaggctgaggcaggtggaacacttgacctcaggatttcgagaccagcctgggcaacatggtgaaaccccatctctacaaaaaatacaaaaattagctggatgtggtagcttgtgtctgtagtcccagatactttggcggggctgaggcgggaggattgcttgagcccaggaggcagaggttgcagtgagccgagatcttgccacttgcactccagagtaggcgatagagaccctatttcaaaaaagtaataataaaaccttctggtataggaaggacatcttttacatgggaattttatcttacattcatttaactcacttattttcaacacttatgcttggattgcctataaagatgagataataaacaactagtcatcattttgtttttcttgctgacaaattttataatataaagacaacataagcttgttttaccagtaaacctagataggaaatcatgcatctttatgatatttaatccccaaaactatgaaaacatgtctgtttcagtcaaaccaacaatattcttatttgccaaagattacccaagtcagatgagctgcaaaagtatttgaggtagttcttaattttctgagagaatacttcatttatacaagcacttatttttcttaaagccaacaaaatagagctctttcataatttaattttggagcattaaaaggagataagaaactatgatacctgtatcatacatacagacttatataaacataaacagcaacagatcttacagctttcatttaaatatcttagccatgttccaggtacagtaatataaaactcctgaatttattaaagactatctggatccaaattgttcttctggccaatggaacaagatttcttgcccagatgactaaagcttttgaataagattcgtgaaggagcttttaagatttttttgtttgatttctgtaaggaacctattataaagaggcaattttttattcatttaatcttttagatgcctctgtgtatcaattaaagaatgcatcccattgcttttgtggcatttttgaacctttcttttctaatgcaccttgcaagtgaacagttttatctaggtcaaaactttcccactgtggccactgtaactcttaagttgtcctcagcaaagttaacccatttttccaaaaatacacatgttcctcataattgttgttcatgaagttagccaccgtcccagaaagtggcgtctcagactctggagtcccagactccttagatttggaggaactcactttcaaaaggcacctgcctgaggcttttaactggatccatttcagttaattatcagatctgatttgctcctggacccagtcctacttgacccagtctaagaattgttcaaataaacttggagaacacaaaacacaaattcctgaagcttggaatctgagatagaactcacccatgacctccagttgctacaagagaacaattggcacagtgtgccctgtcaggtacccttacttggtcactaaatgctcctgagggtcactggagttctacttccgatcccacttctgacaccaatctgttaaaagaaaagctttaggccgggcacggtggctcacgcctgttatcccagcactttgggaggccgaggtgggtggatcacctgaggtcaggagttcaagaccagcctggcctacatggtgaaaccccatctctactaaaaatacaaaaattagtcaggcatggtggtgggcgcctgtagtccaagctactcaggaggctaaggcaggagaattgcttgaagctgggaggtggtggttgcagtgaaccgagatcacgccattacactccagcgtgggggccaagagcgagactgtctcaaaaaaaaaaaaaaaaaaagaaaaagaaaaagaaaaaggaaaagctttagacaaatttagcagagcttatttgaaaaaataagcaattcatgaattcagcagcatgctaaactagtaaagactcggctgggcgtggtggctcacacctgtaatcccagcactttgggaggctgaggcaggcagatcacctgaggtcaggagttcaagaccaccctggctaatatgatgaaaccccatttctactaaaaatacaaaaaaattagctgggcgtggaggcacacacctgtaatcccagctactcaggaggctgaggcaggagaatggcttgaacctgggaggcagaggttgcagtgagccaagatcacaccattgcactccagcctgggcaacaagagtgaaacgccatctcaaaagaaaaaaaaaaaaaacctaaaccagtaaaggctcaaagaactccacctaaccatgtggtcaagtagtacttacagagagaaaaaaagtgacacatagaaatagcctatttagaactcggcatttgctttatctggacaggtctaagcactttgcagtctgcgattggctgaaagctcagttgcaatgattggctgagactcagctacttgttacaagaaactctcatgttaggtttgtttacatattaagttgggtttcagttcactatgtaaggaggcagcttaaggccaaatttaatctaatttaacacctccagcttgaaagacaaaaccaaaccaaatcaaccaagaaacagaaaaaagaaaattcaaagatgtatgagcatgcataactttgataaaaataaaaataataattatttgaattggcaattagaaaatagttatatcctcaggtaacagatgtctctaggtggatgagattgtgggtggtttttcttgttgttgatattttctgtgcatctctaaaaaacatctaatgctttgcaaagaacataagaaacagattagtacattagtggccttggaggaaacaatctcagtaaaacatgtgtttattaatgaatgtattcccccatccctttccaaaaaagttcataggtgtagttatagtcaaaggtaagaggcagtcttgtcagagccagtaaagtaaccaaccatcctggtttgcccaagaccaagcagcttcccaagacactagactttcagtgctaaaaccagagaagtcccatccatactaggagagttgatcactctagtctgtgtaatttgcaaagactctccatatcctttggttcctgtgagtctcaaatccacccagtgaggtacaggtgggccggtggatggtcacctccatttcagaagagaggcagctaaggctcagggaatctccctatccctgacccgggaaaggccttaagagaaagtggtcttttaaactgtgtgtatatatcactttgataaaattaaaaattagttttaaagaagagagagggccaggcgcagtggctcacgcctgtaatcccagcactttcggaggccgaggcgggcaggtcgtaaggtcaagagatcgagaccatcctggctaacacaggtgaaactccatctctattaaaaatacaaaaaaaaaaaaattagccgggcgtagtggtgggcacctgtagtcccagctactccagaggctgaggcaggagaatggcgtgaacctgggaggcggagttttcagtgagccgagattgcgccactgcactccagcctgggcgacagagtgagactccatctcaaaaaaaaaaaaaaaaaaaagagtgagggccaggcgcagccgtcacgcctgtaatcccagcactttcggaggccgatgcgggcagatcacgaggtcaagagatcgagaccatcctggccaacatggtgaaaccccgtctctactaaaaatacaaaaattagccaggcgtggtggtgggcgcctgtagtcccagctactcaggaggctgaggcaggagaatcgcttgaacccgggaggcagaggttgcagtgagccaagatggcaacactgcactccagcctggcaacagagtgagactctgtctcaaaaaaaaaaaaaaaaacaaaaacaaaaaaaaaagagtgggaatccagaatgatagaaagaaaatgagcctgggagggatgaactgcagaggaccataaggtaacatgggagcagttttgcaggtgtatacaactgtcaaaactcactgattgtacactttaattgggtgcagtttttgttgcccttaaattatgcctcaattagagagaaagagagagaatataaggaaatgggggcagccatggcgtccttggagaattcacacttgggacgacaactgctcatttgtgtactctctcctcctcacctgtcttccactccacccctgtctctgatggaacatctctccagctaagccatcttcctcaaggcagcccaattctctgtggggctgccacagcactaaactgttctctgtgtccccaggactccaacctgtctgtgcacacagaaaacccggacctcactccctgcttccagaactccctgctggcctgggtgccctgcatctacctgtgggtcgccctgccctgctacttgctctacctgcggcaccattgtcgtggctacatcatcctctcccacctgtccaagctcaagatggtcagtggctcagggatctcctaccgatggggctgggccctggggattctgcttttattttttaatttaattaaattaattaattaattaatttagagacagagtctcactctgtcgcccaggctggagtgcagtggcatgatcttggctcactgcaacctctgccttctgggttcaagcgattctcctgcctcagcctcctgagtagctgggattacaggcatgcgccaccacacccagctaatttttgtatttttagtagagatggggttttgccattttggcaggctggtctccaactcctgacctcaggtgatcagcctcccaaagtgctgggattagaggcatgagccactgtgcccagccagcattctggttttaatgaggccctctcccacctcctcggctggactgggttccccagtctcacctgacctgcttggggtcatgggaatctgacaactgagaatatatacagccagctgacatattccccacttgggaaagtttaagtaagttcagcaacactctccccacctccagcaagcttctggtcagctccattcccagacctcagtgccagtcccaggcaggtctagtggattctggtggcttcaggtacaaagaccccttcccagtgaggactgtccttgcctctggggatgcggattccaacctgtgctctcttcgcaggtcctgggtgtcctgctgtggtgcgtctcctgggcggaccttttttactccttccatggcctggtccatggccgggcccctgcccctgttttctttgtcacccccttggtggtgggggtcaccatggtcagtgtggggccctgggaaagtggatgggggaggtctccattgggttgtggactgtgatagggaaactgtgggctctgaggagagggctggacatattgggaatgggaagaagaagggggtggccccagaaacttctggccatgtgggatggggagaaatggaggcaggtccagatgtgtgtgttctgcccgggcctccctgccctccctgcacagctgctggccaccctgctgatacagtatgagcggctgcagggcgtacagtcttcgggggtcctcattatcttctggttcctgtgtgtggtctgcgccatcgtcccattccgctccaagatccttttagccaaggcagaggtaaggttgggggagaggggaacctgccaggtttagccctgataggagggtgacctcagggttcaaagtcactgctgggtcccaggtccctccctcgaggcttcaagtacaaacacaattgtgttgttctccacttgctacatttctacctggaagcaggctgaggagggggcaccagtgtaacacaggaatgagccaagatgccaccactgttggaccatcatgtgagggtagggggctgttccacagcacccacccaccaagtgcaatatctgacgtgggtgtcagtcagtgcctgtgtaatgaacacatgtatgcagacaagtgtgaagagttctggcttacctagaggtcccattagcatgttcccttcctttcttcccacctccctcagttcctggccttcctcttgatcttcagtggctgtgatgttgggctggtgggatggaacactgcaggccaacctagtgcctcccatttctccatctcagcgggaagcaggcaaggagagtagcaaagaacataggctgtgaacaacccacttactccccatgtgggctcgggcgggtcgctgaaacctttggagcctcatttccttaattgcagaaagggcgtcatgagctgtcctgcctgtaggctgatgtcccagttagacaaggtcatgtaggtaaggtgatggcaccacacctggcacaggtgccacacctggtcctcgctgaaccagagctcccttgtgatccttcctcatctctcagagtcctctgagtggggacctggaggcccccaggtgctgcctcctgccccagaggagactgatgccccaagggactccgcagggcaggggctgcaggcccaggcttttccagtgcttctgacgcccctccactctcccacccagggtgagatctcagaccccttccgcttcaccaccttctacatccactttgccctggtactctctgccctcatcttggcctgcttcagggagaaacctccatttttctccgcaaagaatgtcgaccctgtgagtttcccatggagggtgcgggggctccacagctgagtcctcagcccaactctgaccagcagcccccaacccctccagttcctttcaaagtgggagagaggtcatccccacaatctgtaaactggggcttggagcaggaacaagggtcccctccatttccctactctgctttgagagggtggtgggcactcctgattcccccgtcctattctctcgccttctagaacccctaccctgagaccagcgctggctttctctcccgcctgtttttctggtggttcacaaagtgagttggctcttccaccagccaggccagagggaggggagggatggaaggtgagatggagaaaggggagcagggcagcagtttagggaccgggctggccacctatcccaccccccaccgcagtgggcacagggcagatgagggtagggaagtggtctgggagggggaccaaatgcagaggcctggcctggcccagtgccgcccccaggctacaggccagccctgcatctggcaggctgtggggacaggcccaggaggctggaagaagactgtcattagttctgagctcctctgtttgtgataaacttgcagcctgtcatctccttggctgcgcctcagagcggcttgagcaggataactgtgtctgtgacctgggtgacagctcattaaccccacagcactgaggaagcacccgaggctggggccaaattgcccaggcctcgtcctcacccagggccccaggcagcgtggattccatcaccagggcctggggtggggaggagatgggacacctggggaggaggaggagaagggggtagtggtaggaacttcggagggagagccagtgacctcaagcctattcactgaggaaatgaaggagacacctttcatggtcacagtgcccgagggagaccctcctttctggagaccctggggccctggagacactgacccttggctccaggctgctaaaccctgaccctctgcggggctgcctgccgggcttcacctccccccaggatggccatctatggctaccggcatcccctggaggagaaggacctctggtccctaaaggaagaggacagatcccagatggtggtgcagcagctgctggaggcatggaggaagcaggaaaagcagacggcacggtgaggccctccccttgccccaacacccagccccttcgcttaccccagatctcctgcagaggacgctggtagaccttggagggcggcattgctggggtggcaagcagagcaggaccaggtgatttcttggcagcctcgggaccattctatgggaagcttaggcctggatggcgctagttctcccagctctggtgggggcaggagaatggctggcactttggagcaactactccatcccaggtcccatcctaaggatataaataaactcacttaatttttcaacagccctaaagggtaggttcaagtgtccctgtgttacagatggggacactggggccgggtgtggtggctcacagctgtaatcctaacactttgagatgccaaggcaggaggattgcttgagtccaagagttcaagaccagcctgggcaatatagtgagaccttgtctctacaaaaaataaacaagatgagccgggcatggtggtgtgcacctgtagtcccagctacttgagaggctgaggtgggaggatcatttgagcccaagaggtcaaggctatagtgagctgagattgtgccactgtactccagtctgggcaatagagtgagaccttttctcaacaacaacaaaaacagatggagacaccgaagcacagaaatttaacagagggcctcccagggtccccaagttggtggtggcagagctggaatccacatggagccggctggccccagaggttctcctcatatcactgcaccaccctgcctgactgagagggctgattccagggccaggagccagcacacccctgccaattctgcctcctcctgtctggaggcggcggctgaatgagatgatcttcccctgaggggtcttcccactgtcagcctcttatcaaggaccacaaacctgtctctggccaactgcctcaccaagagagctgacgctgagcatcatctttctccacccaattctgaccccaggattgaaccctccctcctcccatccacaatccaggcctaggagttcaatgtttgctcagcccggagcttccggttgtcaccagctgttggaggagcctggggctgggcatggttagcagtatcctggctttcatggcttggagcctccacgaagacctatgggcccccagtctgcctgctgcaccccctctcagtccctccatgccactccaccccctccctgttcagctgcccggtggctgtaccaacagccatccttgatcttatctaccttccctcttggcgtcctccctggagccagcactggggaggcggggagagggccagactggggggatagctgggttttagagtccttgtggtagcagtctggccaccccttcagatgccctctggcagctgaggacagagtcgcttgtgcaattcttatgctgtctgttcccctcccagctctgagagccaagaaaacagctccttcctcctcctcactcctagccagcccagcctagcccttggcttcctggagcccctgtccccattcctaacccactgctccttcctccctggaccagacacaaggcttcagcagcacctgggaaaaatgcctccggcgaggacgaggtgctgctgggtgcccggcccaggccccggaagccctccttcctgaaggccctgctggccaccttcggctccagcttcctcatcagtgcctgcttcaagcttatccaggacctgctctccttcatcaatccacagctgctcaggtctctccacactccggctcactatagccctgccctgggcagcagggctggctggctagcccagaggaaggaacaacgtacagtgaaaagaaccccagaccaggaaccagggaggctagctccactttctgtgtgacctttggcaagtggcattgcctgacttgtttcctcactcacattcaacttagaattgctgtgcatatactatgtgccgggcaccgtggtgtgtacgttaacaagcattgggtctttaaatcttcccaacaatcctatgcggaattgccccattcccatgtcacagatgagaaagcaggaactcagagaggtgaagtgacttggccaagggcacacagcaaagaaggaatcaggtctgagtccaggactctgagctccgactgaggtgctctgtccccaccatcaggctctaacatctgtctcaggaatggcttggactagaacgagctctcaaatgagagggtgggaaggagagctgcctagtagctaagtccccacctccttgcccctccgtgcatgcattaatttgttcagcaaacatttattgaacctccagggtaccagaatggtgctcgatactagggatacagagttcaataagacagggtcttgatgtcttatgggagaaaccagcgtgtaaatcaattagaattcagtgggggcagaagtgttctcgggtgtctggaaaaccccgggaggggcaaagaagccagcctgggatgcagcaggaagcacccactggcttgggaggtcaacgaatttggagagacaagtaggtgaagaaacaggggaaagttcagcctcagcttagtcacaaagccctgaaacagcatgactcaggtgtttctgagtggcagaggaaatggcaacgagagggaggggcaggaaaacagagagagggagagctaaggatatccttgaaagatctgagccagggaggggcatctggcttcaaggatctcctgccaggagtgtgggggatgtagggcagggtggctggatggaagtgggccaacccggtcagatggagtccaggccaggaatgagacaagtattcaggagcaatttgggagatgggcgtgtgcgccagagagacagaggagtgccaggcaacctgggtgctggcctgggtaactggaggacgatggatcttttgctgagctgatgggctcggtgggaggaggaggctgggtggggggcaaggtggtggatggagtctggtcatgtggggccagtggtgctggtgggtcctccaaggggagattcccagctagctggaagtcaaactctcgagcccaagagtttgagaccagcctgagcaacatagcaagaccctgtctctacaaaaaagttaagatattagccaggcctggtggcatacgcctagagtcctagctactcaagaggctgaggtgggaagactgcctgagcctgagaggttgaggctgccgtgagctgtgatggcaccaccgcactccagtctaggtgacagagagagaccctgtctcaaaaaaaaaaaaaaaaaaaaagagagagagagacaccagtcactgggctggggccactggggcccaccctactccaatatgacctcaccaaatgaggccacgttcacaggtaccaggtgttgggagctgaacatatctttctgggagacacaacttaagctatcacagaaggggaggcctggctatgattatggctggagggctccatgtagtcgagaggagagtgtcccaacaatgaagagactcggtcatgtcaataggtgaaggtgtagagcttccagcagaggtggccagggtgaagctcagcggcaaagggggcaacagcgcagcaagttcctgaggaggcagaggaaggccagggctcgggggcaggggcagcctccgacagcctgagcaccagaaaaaggaggacaagccactggagggcagtttgtgagtggcaaggagtttgtgggtggcagggagttctcaatgggtggctaagcaagaaggcaggtagctgctgagaggggtggggggctgggatgggcctgaagggaagagaagagaggtgaagaaggccccaagagcgggggcggattagggacctagagaaggttgctaggcagtgctgggggccactgagtttggaaaggtggatttgagcggcaagagtctttgtggtcatgtggcggaatctagagcccccagcagcctaggagaaggagcagggaagtccagtcaatggaaacgtggcatttcttcccgccatatgtcaggaggtaagaaggcaggcaggtgaggctggtggtgagagcgtcatcgatagggcgtgcagcagggtccatggtggatagagaacgaggtgaaggcagagtggagccaggaggtcgtggtcttgaggcagtactgggttgaccctccctggcccaagaggttggagggggtggaggtttcagaggccaggggtgcagtggagactgcgggtaaaagcaaagggcagcagaggagggagcagccatgggggcagcactgcccacctcactcctctctcctccccacagcatcctgatcaggtttatctccaaccccatggccccctcctggtggggcttcctggtggctgggctgatgttcctgtgctccatgatgcagtcgctgatcttacaacactattaccactacatctttgtgactggggtgaagtttcgtactgggatcatgggtgtcatctacaggaaggtcagctggagcagggcccaggggaaaggctggccctgggcagcttgcaagaggctcgcagccaagtccacccactactgtctacctgcaggctctggttatcaccaactcagtcaaacgtgcgtccactgtgggggaaattgtcaacctcatgtcagtggatgcccagcgcttcatggaccttgcccccttcctcaatctgctgtggtcagcacccctgcagatcatcctggcgatctacttcctctggcaggtgactctccaaccctgacctctgcctccttcctctgacatgctgcagaagtggcaagagaggattattctggaactgggagcatggcacatgcttgtagtcccagctgctcaggcggctgaggcaagaggatcacttgagcccaagagttctggctgcagtgcgccacgattgtgcctgcgaatagccaccacactccagcctgggcaacatagcaagaccttgtctctaaaaagaaacaaagaaaacagaaaaaaagaaggagggttattctgggttagcagaggggatatagaattgacacaagagctggctgggcacggtggctcacgcctgtaatcccagcattttgggagaccaaggcgggtggatcacgaggtcaggagttcgagaccagcccggccaggatggtgaaaccccatctctactaaaaatacaaaaattagccagacgtggtggcgggtgcctgtagtcacagctactcaggaggctgaggcaggagaatcgcttgaacccaggaggcagaggttgcagtgagccgagatcataccactgcactctagcctgggtgacagagcaagactctgtctcaaaaaaaaaaaaaaaaaaaaaaaaagaattgacacaagagcttccctaggcattggtggggatggagggataggacttcgaggatgctgatgtctgcaaaggaatcttcccaacatctgttgctatccttcctgcagaagccagggaggaaagaaagtcttggagggaggtgggtgtgactctggctgtcatcgtctatatttgccttcctgtgtgtctggacacccttctatatctgctgtctgtccctgtcgtcgttatctaatggctggctgcttctacaaatgttgtggtcattctgactttctatctgtttggccaaccaccatcttttgcttcctgcccatctacacatttcaagttaacaggcctctgtttgcctgttgggttctctctgtagactttggtaatctgtccctatgtgtcatctatccaccggtgcctcctcagaacctaggtccctctgtcctggctggagtcgctttcatggtcttgctgattccactcaacggagctgtggccgtgaagatgcgcgccttccaggtaggtgctgtcagaggtgcatcctcctgcctgcagcacccggccggctgcctgggggaaggtgtccactaaccttggggcctcccaactaccttgcttcctgagtatggatggctactagccatttgcagaaaccatagctcactcttccctcacagctctcagagggttttactgacattctcattttgtagcagaagaccaacgcttagagaaataatggcagtccagaatcaggcagggctgggactcaaacctgactatcctggtctaacaaggagttttcccgctgcactgtgctaagcatgaatagccagtcactcagtctactatttgcaaacatttcttgaagtgttttttttctttttttttttttttgagacagggtctcgttctgtcacccatgctggaatgcagtggcatgatctcggctcactgcaacctctgcctcccgggttcaagcgatcttcctgcctcagcctccctagtagctgggactacaggcacatgccaccacacccggcttatttttgtatttttttttttagtagagatggggtttcaccatgttggccaggctggtctcaaactcctgacctcaggtgatccgttcatcttagcctcccaaagtgctgggattacaggtgtgagccatcacacctggcctattgaagtctactagcttcccactgcccataggaaaaatgacaaaccccctaagaagactcagcaggcttctgcttaccttgcaagtcctcaccccctgcggactggccaagtttcagccagtctggtcttctttcttttctccacagcaccaagctcagggtacctctaggggccaccacatatactattccctctgcctggaatgcttgtcatccccctcttgcctgcctaactcctttccttcccttacctctcggcattgaagtcacttcctcggctgggcacggtggctcatgcctgtaatcccagagctttgggaggccgaggcaggtggatcacctgaggttgggagatcgagaccagccagaccaacatggagaaaccccgtctctactaaaaatacaaaattagccgggcatggtggcacatgcctgtaatcccagctactctggagtctgaggcaggagaatcccttgaatccaggaggcagaggttgcggtgagccaagatcgcgccattgcactcccacctgggcaacaagagcgaaactccgtctcaaaaaaaaaagtcacttcctccagaagtccaccctgactgcccagtctcagtctaagttagtttccctgccatcacctcattactttcttacaggatcctgtgatttcccatcagaacacacataatgattaataattaagcatttattcagatcattgtttgcttattgtatgcctcccccatcagatcgtcagctgtatcatggcaggggccttgtctgaattcatcgtgacaaattctacacgtagcccatggcctggcacatagtaggcactccataaataggggttgaatgaatacattaatctggtgtgccacaccttgggctaaggtcttggagaacaaagagaaataaatagtccatcccctcaggaagctcacagtctgattagagaaacatatatgtaaaggaatggttatggaacaaaaggaaagtgcaatgtgctttagaaacccagggaaggggaccaggtgtggtggctcacacctgtaatcccagcacttggggaggccaaggtgggaggatcacatgaggccaggagtttgaaatcagcctgggcaacagagtgagacctcgtccctacaaaaaaatttaaaaattagctgggcatggttgttcatgcctgtagttccagctagtcaggaggctgagacaggaggatcaaaggagcccaggagtttgaggctgcagtgagctatgattgtaccactgcagtccagcctgggcaacacagtgaggcaccatctctaaaataaataatactagcaataataataagaagaagaaaaagaagtagtaggagaagaaacccagggcaggggacagaggatgctgcctggggaggccggtgcagtggcactgagggtggagatggatcttgtcaggcagaggacacagggaggcaggggctgtgcattccaggccaaggcacagcacaggcccagcaaggagttgtgagaaggaatggtgggcagcgtggaatggctgcaatggatgagaatggatggaaggtaggaccctgtgagcaggaggtcaggggagggagcaggtgtgccactgacactctttctgcctgcacaggtaaagcaaatgaaattgaaggactcgcgcatcaagctgatgagtgagatcctgaacggcatcaaggtgctgaagctgtacgcctgggagcccagcttcctgaagcaggtggagggcatcaggcagggtgagctccagctgctgcgcacggcggcctacctccacaccacaaccaccttcacctggatgtgcagccccttcctggtgaggcttggcacagggctgggtccctgcctccagggctctgggtgcccaggcatggccagggctcattggactctaccctgacaccacctccacgctgctcaggtgaccctgatcaccctctgggtgtacgtgtacgtggacccaaacaatgtgctggacgccgagaaggcctttgtgtctgtgtccttgtttaatatcttaagacttcccctcaacatgctgccccagttaatcagcaacctgactcaggtaaccctgggtagggctgggggctctactggagttggaacaggttgttggggtcagggaagggtcacttagggcaagggataatcagggggagttattggattcagggaaggttgctagcattatgaagagctattcaaggttgaatgaggtcattaaggtcaggggtcatttggagtcacaggtggtcaggtcgggtgtctggaaacctgagttctgtagatagcctcctcttaccaacctggactttctctttgggcagtgggagccatggaagactcagtcgtgggagggaccccagtgctagtgtctgggccctcagggggtcctgcctagcccaggatgctggggatggggcgagggtaggggttgggggttgggaaagtacagtctctagggctgactcacatcctcccgtaggccagtgtgtctctgaaacggatccagcaattcctgagccaagaggaacttgacccccagagtgtggaaagaaagaccatctccccaggtctagagagcccctacctgggctgcctgccccagtccttgctccagaaaaacctctgtttcaagcttttcctttgttctctcctgaccccttttcttcttcctctgttcacatctgcttcgactctgacctcctccctcttccgggttctctgctctcctccgccctcctccacagggctccccacatccctttcttcctcccttttcccaaggatcccctccccatggcccaggctcctcccctgtcctcctttcccctgccccccagcctccctgcaggctaccccatcccttgagctccctccctgaccctgcccaccttggtcctctcaggctatgccatcaccatacacagtggcaccttcacctgggcccaggacctgccccccactctgcacaggtaccagcttctcccactcccttcccagctgcccacggtgggctggaagttcagatcaatagcagcaccctgcaaagcctttgaccaagaatgcaggaagagcttcagcctgccaggggggtgtctggaagggcggagggcttggttctgcaggtggagggttggagaccaaaaccctgatccctgcctctaactggactcctggggtccttgcccccagcctagacatccaggtcccgaaaggggcactggtggccgtggtggggcctgtgggctgtgggaagtcctccctggtgtctgccctgctgggagagatggagaagctagaaggcaaagtgcacatgaaggtgagagaggcaggggctcctgggcagggtgtggggctcagccaggccttgggcaagccccgaggtaaatttctcctgtggccagggctccgtggcctatgtgccccagcaggcatggatccagaactgcactcttcaggaaaacgtgcttttcggcaaagccctgaaccccaagcgctaccagcagactctggaggcctgtgccttgctagctgacctggagatgctgcctggtggggatcagacagagattggagagaaggtacagagtcctcttccatccctaagaggctagggcatagagctgcccacctcaacccagcccaggtccatatattcatcccttcattcacacattggtgtaacgttatgcccaactctgtgccaggcactggggaaacagatctattagcagatctgtttagtgaacaagtaggaactattgaatattctaggagccaggctgaaggcctgtgcagggtacagggagggcacagcagggagcctacataaggaagagcatcactttttttttttctttctttctgagataaggcctcactctgttgcccaggatggagtgccatggtgacatcatgggacgctgcagcttggaactcctgggctcaagtgatcctctcgcctcagcctcctgagtatctgggaccacaggcacatgccaccatacccagctaaatttttaattttttttagagacagcgtcttgccatgtcgcccaggctggctcaggagatcctcccaccctggcctcccagagtactgggattacaggcatgagctgctgcacctggctgagcatcactttttttttttagacagagccttgctctgtcacccaggctggagtgcagtggcgcagatcatggctcactgcaacctccacctcccgggttcaagcaattctcgtgtctcagccacccgagtagctgggattacgggtgcgcaccaccacacttggctaatttttgtgtttttagtacagacggggttttgccatgttggcccatctggtcttgaactcctggcttcaagtgatccccccgcctcagcctctcaaagtgctgggattacaggcatgagcaccgtgcctagccttaagcatcacttttgacctcagttttaacaactgaggaggaggagctcatcatgtatctgttcattcatttaccatatatttattaagcacccactctattctgggaaatagtatacagtagtgaatactaaaatgccgggctaatatctctaccttcatatagctcacattctagtggcaggaagagataataagtaagataaataagtacaatatataatatgttagataaatgctcagtggaaaaaataaagcggggaaggaatacaggaatgcctgcagagttgaatggttaaggtagcttgggaaatcctcactgagaatcagagaactcaacaaagagaccgagtgagccttgtctggagccagaaagctctgtctggggccatggaaccctgtatggggtcttggagttctctggcatgactaggagttgggaaatggagggaaaagatagagagaggcagaaccctgattaccttggttaagattttggcctttactctaaaaaacatggaacactggggaaaatttggggctttgctttttaacaatttttaactgtggtaaaaaccacacataacataaaatatatcatcttgcccggcatggtggctcccagcactctgggaggctgaggcaggtgtatcatttgaggtaaggagttcaaggccagccttgctaacatgataaaaccccatctctactagaaatacaaacaaattagccgagtgtgatggcgtgtgcctgtagtcccagctactcaggaggctgaggcaggagcattgcgtaagcccaggaggcggaggttgcaatgaactgagattgattgtatcactgcattccagcctgggcgacagagcaagactctgtcttaaaaaaaaaaaaaagaaaaaaaaacttaatcatttcttagtgtacagttcagcaatgttaagtacatttacattgctgtgcaaccgatctccagaaccttttcatcttgcaaaactaaaattgtgcctattaagcaactcctcattccccactgcccctaggccccagtaaccaccattctattttctgttcctaggaatttgactacttagtatcttagtccattttctattgcttataagagaatgcctgaaactaggtaatttataaagaaaagaaatgtattttgtacagttacggaggctgaagagtccacggtccaggggctgcatctggagagggcctccttgttggcggggagtctgcagagtcccaaggccatacagggcatcccatggcaaggggaccgagcatgctagctcaggtctctcttccttccttccttttttttttttttttttttttttttttttgagacaaggcttcactctgttgcccagactgtagattggagtacagcggcgtgatcttggctcactgcaacctccgcctcccaggttcaaacgattctccttcctcagcctcccgaatagctgggattacaggcgcacgcaactacagcccgactaatttttgtatttttagtagagatgggtttcaccatattggccatgctggtcttgaactcctgacttcaaatgatccacccacctcgacctcccaaattgctgggattacaggcatgagccaccacgcgcgacctcaggtttctctttctttcttataaagccaccggtcccactcccccagtaacccattcacgcatcaacctattaatccataaatggatcaaccattcatgagggctctgttttcatgacctaatcacctggtaaatgccacccctcaatcctgccacactggggggtaagtttcaacatgcactttggaaggaacaaatatttcaaccatatcacctaggtacctcacgtaagtggaatcatccagcatttgtcttttcgtgacgggcttatttcacttagcataatgtcctcaaggcatatccatgttgtagcatgtgtcagaatttccctccttgtaaggctgaatgatatttcattataggtatatacacatttgtgtgcccatttatccgtagatgggttgggcaggacaccaagctgggcagggtggtgaccaatggagcagaatggcctcacctgccccaggaggacttaccctttacctctgtccctcacagcattgcagggacagactaggccccatgtgaaatatagattcagaagactgctgttctggtcaggcacagtggctcacacctgtaatcccagcactttactttgggaggctgacgtgggccaattgcttgagctcaggagttggagaccaggctgggcaacatatggagattctgtctctataaaaaataaaacattttagtcagtagccaggcatggtggtcctgcaatcaatcctagctactcgggaggctgaggcatgagaattgctcaaacgcgagaggcagaggttgcagtgagccaagatcgcaccactgcactccagcctgggtgagtgagaccccatctcaggaaaaaaaaaaaaaaatctgccatcccaaataacagtggacaggccgttgtctccctgtgcctgtctgaccccatttttcccaccccccgcctccctccagggcattaacctgtctgggggccagcggcagcgggtcagtctggctcgagctgtttacagtgatgccgatattttcttgctggatgacccactgtccgcggtggactctcatgtggccaagcacatctttgaccacgtcatcgggccagaaggcgtgctggcaggcaaggtgaggcctgccagaggctaagggggctaaggtgagatctgaggcccgaagagagagctggtgagaggctgaggggtttggatgagacttggaggtgtggggggcgcaagaagtgggcatgtgggttgggcatcaggagaaacctgtggggacaactcccccacctgcgaggttctgagcaggctgtggcgagcacagggtgagtcacccatgtgcctgtccaagctccctggcacatgggcacacttcacactcactctgtggctccgtgcctgtgccaggggtgtgctggagggtggtaggggtgagagcctgctgccttctccccagacgcgagtgctggtgacgcacggcattagcttcctgccccagacagacttcatcattgtgctagctgatggacaggtgtctgagatgggcccgtacccagccctgctgcagcgcaacggctcctttgccaactttctctgcaactatgcccccgatgaggaccaagggcacctggaggacagctggaccggtatctgccatcctgggccctctgattcccatgccttcccagcattccccctgtctggggtctctgagtgtgtctagactggcctagtgttgtgccaggcaggttctgggaaacttgggccatctgtgtgacagtcaccagaggtaaagtaaactggacatagtcgggtcccactgcctcctccatcctactctaccctaactgtgggaactcagatcctccgccccggtctcagagcctgttttctttctttctttctttctttctttctttctttctttctttctttctttctttctttctttctttctttctttctttctctctctctctctctctctctctctctctctctctctctctctctctctctctctctttctttctttctttctttctttctttctttctttcttttttttcttttgaggcagagtctggctctgtcgccgggctggagtgcagtggtacaatctcagctcactgcaacctctgcctcccaggttcaagtgattctcctgcctcaggctcccgagtagctgggactacaggcatgcgccaccacgcctggctaatttttgtatttttagtacagacatggtttcaccatgttggccaggatggtctcgatctcttgacctcgtgatctgcctgcctcggcctcccaaagtgctgggattacaggtgtgagccaccttgcccgatctcagagcctgttttccatctgttgaaagcataggagggcccaggcccagcttgtgtggcaaggctgcttcatggataaatagtttggcaagtatgcaagtgcttagcaaagccgcttatttatcaaccaaaatttattggacaatcactatatacaggcactgttccagacactaagctatagcagtgagcaaacaaaaaaattatagtcctcatggagcttgttgacgtctctgggctcacaacatgcccctggctccttgttgcccagacccagctccccagcccccaattctggattggctcacagaccttttcctgggctttcttgcctatggctatacatacagccaacgtgccttgagcatttaccaagtgctgtgcccctcgctcacacactggacacattttcttttaagcctacagtcatgcagattttttttttttttttttggggacagtttctcactctgttgcccaggctggagtgcaacggtgcgatcttggctcactgcaacctttgcctcctgggttcaagcgattctcctgcctcagcctcccgagtagccaggattataggtgcccgccaccacgcccggctaatttttgtatttttagtagagacggggtttcaccatgttggccaggctggtctcgatctcctgacctcgtgagctgcctgcctcagcctcccaaagtgctgggattacaggcgtgagccaccatgcccgaccaaggacgtgagttttaagctcagccagtctaactccagagcccaagttcctaacccttgtatttgagtccgtttctccataatttgtgaagagagtttttcttgttgcttaacccaagtctttcttgttgccctttcaatccccctcattttattttcatgcttgtccattgaacccctttcattagagtggggaatgggagataccaggggcttgcagggagaactagctgaaccctatctccttcctcccaccctactgcagcgttggaaggtgcagaggataaggaggcactgctgattgaagacacactcagcaaccacacggatctgacagacaatgatccagtcacctatgtggtccagaagcagtttatgaggtgagttcctgagagctcccagccctcccggaggctgtatcaggcctccccaggccctgccagatggggtgcaggtttctccctgacactcccagcctctgtcctggggggtgcttgaggccccctccctgggcctgaccagctgcctccacagacagctgagtgccctgtcctcagatggggagggacagggtcggcctgtaccccggaggcacctgggtccatcagagaaggtgcaggtgacagaggcgaaggcagatggggcactgacccaggaggagaaagcagccattggcactgtgagtcggtggggcaagaggggctggaggggatggacaggcaggccccagcagccccagggtttatggagtcccctgtccctgactgccatggctgctccctacaggtggagctcagtgtgttctgggattatgccaaggccgtggggctctgtaccacgctggccatctgtctcctgtatgtgggtcaaagtgcggctgccattggagccaatgtgtggctcagtgcctggacaaatgatgccatggcagacagtagacagaacaacacttccctgaggctgggcgtctatgctgctttaggaattctgcaaggtgagcttgtgggggtgtccagaaggggctccaatatcccttcttctctgggctgccaggccccccaaaccgtgcccttgcatccaagcctccctaacccactctggtcaacccgtgtctctgattctgcccctttgtgcccgctcactagtccaggtgagccagcgccctctgccttctccaacagggttcttggtgatgctggcagccatggccatggcagcgggtggcatccaggctgcccgtgtgttgcaccaggcactgctgcacaacaagatacgctcgccacagtccttctttgacaccacaccatcaggccgcatcctgaactgcttctccaaggacatctatgtcgttgatgaggttctggcccctgtcatcctcatgctgctcaattccttcttcaacgccatctccactcttgtggtcatcatggccagcacgccgctcttcactgtggtcatcctgcccctggctgtgctctacaccttagtgcaggtgtggggtgggcgtgattccagtgtgggcgtggtgttattggggcggggcaacacatgggcgggggcagcaggggtgggacacttcaggccaccaacattacagagttttgttaggggcagtcgttgcttaacatttatgttaggggagccattacttaacctctttgaaactcatttgcctcacctgtaaaatagaatgactcatagaccttcctcatggagttggtgagagaataaaatgaaatagttatacattgtagctggcactgggactttcctgttggctttttttttttggggggggggggacggaatctcgagtctcgctctgtcgctcaggctggagtgcagctgcacgatctcagctcactgtaacctccgcctcccaggttcaagcaattctgtttcagcctcccaggtagctgggattacaggcatgcgccaccacgcccagctaatttttgtagttttagtagagatggggtttcactatgttggccaggctgctcttgaactcctgacctcaagtgatccgcccacctcggcctcccaaagtgctgggattacaggtgggaaccaccatacccggccttcctgttggctgttttttgataaaacattgtcaacagtttgggacacattatcctttccttccttttatacatatctaaacatacgtgtatgcatgcgtttaacatagatgagttgataaccttcagatacagctaactgtaaaaggcctttgcagacactgaactcctgttctgtaatgaattagtcagttcccggggatagatgctcaacacctgggtatagcgaccatgatctaggctgtgctctgtgctgggctaggggagaatcagatagacatcctgtatagcctggatatctgaggccacagaggagaggatggaaactggaggcagagccgtgttgttgtggggttgaagcagagatgatcagagggagggagtgaatgacacatcaaggccccaagtcttgggtccttggaggtgggggaaggcagcgatgtctcgtggtgggagtgaggctggctgggaggactcatctgaaaatggatgagttcagagacaggcaggactgagttgggggttccatggccctgaccccaaactccttctccctccatcagcgcttctatgcagccacatcacggcaactgaagcggctggaatcagtcagccgctcacctatctactcccacttttcggagacagtgactggtgccagtgtcatccgggcctacaaccgcagccgggattttgagatcatcagtgatactaaggtggatgccaaccagagaagctgctacccctacatcatctccaaccggtcagaagccgcctccctcgctccctgctcctccaggaattcccagcaggctctctggtgttcagggtccttgtccctcctttcccctaagcagaaaactggccctgccctgcccctgccccatttcctcctcatctgatcccccataggtggctgagcatcggagtggagttcgtggggaactgcgtggtgctctttgctgcactatttgccgtcatcgggaggagcagcctgaacccggggctggtgggcctttctgtgtcctactccttgcaggtatgaagggcctggaccccagggcagggccaccactgggacagaaaccacacaggtgttccaggcatctcccgagtgcccctccctgctcagtatgggcaccagccacagggtctgttctcaaggactgtgagaaaaaaaaaaaaagaaaaaaatcattgagttgacaagtttataaccacacaccatggctggatgttcctactttccttccccaagaagcccatgttctcacattcagaaagaattctgttgaataatctctgtcctcaaaccccacatctctctcctgctcagccgtcgaccttgcctgacacctcacagttcaactggagagacccccatcagcaggagattgtgctgcaggctgagcaggtctttgtggctggagaaacaaaatgttttaaaagcccagaagagggactgggtgcagtggctcacacctaatcccagcactttgggaggcggaggtgggcggatcacctgaggccaggagctccagaacagcctggccaacatggtgaaaccctatctctacttaaatacaaaaattagccagccgtggtggcgggcatctgtaatcccagctactcaggaggctgaggcaggagaatagcttgaacctgggaggcagaggttgcagtgagccaagatcacgccactgcactccagcctgggtgacagagcgagactccatctcaagagagaaaaaaaaaaagtccagaggagttttcttgctttggggtgttgtagaaatgatcttggagcttagccccaaaggacaaacagaatttctcttgtctctgggcaagttgtaggctcatgtgacaggtcaggacagtgtagggctggcataccgctcgctcacgttcacatgcttgcagagaacgtacacagacgaggtgactgaagcctggtctgcaggtcaggcaggtcatcctgatgccagcttgtactgtcaaagagtcacctaactgcaaacggaatttttgtaaagcagatcacattgttaatacctcaggtggctcaaaccttgaacgcgttggcaaacaaaaaacaatccagaaaggtcaattttcacaaaggtcagtgtgcacatgaatctacttgttaaaatgtacattttgattcagtagacctaggatggggctcaggactctgcactttgatcaagactccttggtacgcaaagtgtggcccatgggccagttgcatcaccatcctctgggagcttgttagaaatgaagaatctcaggttccaagtcccacctcagactacagaatccggcgttgcattttaacaagattctctgggaagtcttatacatattaaagttggagaaacagaaaccaaggcgaggtggtccttggttaagtctgcactgtcactgcccaagggagtcattcgtgattacagccccagctggcatgcctgtgggcttgatccaggcccacctgggtcatccatgggctaggatcccatggatgggcacatgatccaggagtctgaactcctcccaaagccattacggtggggaggggagatcgccatacgtataacccagtccctttggccaggtgacatttgctctgaactggatgatacgaatgatgtcagatttggaatctaacatcgtggctgtggagagggtcaaggagtactccaagacagagacagaggtgggtactggcatgagcccgggacagggggaatctgaagtagctggggaagaaagcttggtggctctctctccctcaacatcagggcctgccacgtatggggctcttcattcatttacccattcactccttactgagcatcaaccaatgctctatgctaggaggtgtagagagatcagagttgagcaagacggtgtttgcccttaggtgattctgatttggtgggaggggtaagacctattgcagggctttgcagtggatgaccagatctctggcgtggtgcacctggagagggcagatgagggagatccttcagctggggtgaccaggggagacgagcttagatgagaaggatggacaggctttgatagactaagtaagatggtggggtgggcagtgggaaggtgagcattccagccaaagagaccagcctgggcaaaggagtggaggtggggcagcatgccctttgttggggaaaaggagttgttccctactgggggttccagacttttctccaccgccccctctcatggtcacaccttagccctcttcatgcccagaagctgcagcatcagtgtcaagcatcccatctttggcccacgctcctatcctgctcgctctcatgctccaagtcccccactgtcacagcagtctgccttcactgggactcccaatcccatgacccccctttgtgtctctgtccatcagcttctctgccttcacctccctccccggccagcctagagtctatgctccaccaacacaaacgctctcacctgccttgcccttctctttcttctctctcagttgtactcacctccaaaacccaccccagctgagcccaccaatctgccttcttcatgcctgcactgagcacttaaaaccttgcaggaggcggggcacagtgactcatgcctgtaatcccagcactttgggaggccaaggtgggtggatctcttgaggtcgggagttcaaaaccagcctggccaacatggtgaaaccccatctctactaaaaatacaaaaaaatagctgggcgtggtggtgcacacctgtattcccagctacttgggagtccaaggcaggagaatcgcttgaacccaggcggtggaggttgcagtgagccgagattgcgccactgcaccccagcctggataacagagtgagactctgtctaaaaaaaaaaaaagcttgcaggagaaaaatcactgagttgacaagtttataaccacacaccacggctgcatgttcctgctttgcttccccaagaagcccatgttctcacgttcagaaagaattctgttgaataatctctgtcctcaaaccccacatctccctcctgctcagccatcgaccttgcctgacacctccataaaaagtaggttctaagacgtgaactccctcaaccttcctgcctctcagtctttaaacccgcctgtgtctccttcaccgttgtctccttttcacttttagcaggaatcatccctttctgtttcaaagcccagcccctccatttcttctcatggccgcttgaggacctggcttcctcagtcccgccctccatctcctgtcattcttgctccctctgttggacgcttcccatccacatgcaaaaatattccatcacatcttccattccagacacacacgcaaaccctcccccctgcactccactgccccatttctctgctctcctctgtcatgaagcatggtttaaagtatggtctctacaagctgcatccgcttcctcatcagccttgatgtcatctgcctcctgcagtcctctttctggccctcgctccacggagacagctcaccagtgaccttcctggttccaaatccaggggacgcttttctgttctcgtctaattcaacctcttagcaacgtcccaataaaatgacctctcccttcttcttggagtcctcgtggattccgtggcctgcattgcacccgccagtccacctgcctgaccccagcctggcttccccaggcatcaccctctggcccctcacccctcactgtctgggagcttccagttcccctgcttcatgtctagcagcccagttcctgcatggatacccatgctcctgtctctgtatcctataaatgtctgccctcaaccccacggcccgttctctgacgcctccttgagagaccaatctgtgcctgctgctctgctttttcacctctggccgcgtggtttctcctgcctcgaagcagggctggctccacaggaatagtcacagcgtccccactcccggaagaactgcgcgtttagagtaatgctctgccgtcagtgccttgacattctccatcattcttcaacaagaagcctcaggttttcattttgcactgggcctcccaaattatgtagccaatcctatctcaaagccaccatcatcttatgccctgccagtctattctgcttgtagctgccaagagatttaaaaaaaaaaaaaaaaaaaatcaaatcacgtcattcctctgtgtacagccctctaatggctttgcatcttaatcagagttaaaaaaaaaaaaagtccttaaaatggcctgcaaggccctacatgatggagccaccattacctcagcctcttacctcttgcctttgccagtgtgctccagaacacacctagagccatttatgcctgctgttccctctgcctggcatgccctccctccagatatccacttggcttgttccctcacctccttcgggtctttactaaagtctgcctcctccaggaagccttccctgaccaccctgtataaagcagcaacactaagcacttcttggccccagcactcatcacttcttgcgttgtatagatttgcttatctgttgattatatgcctccctctactagaacataaatctcacgagggtgaggactgtttcaatggggtaccattgtgtccccactgcctggcactgggctgccacccagtaacaatgaatgggtaaaggtaatgagagggggagttagggcaggcagggagggcacttcaaggaatataaggtgtggcacagtggctcacacctgtattcccaggactttgggaatcctcctaggcaggaggatccctggaggctaggagttcgagaccagcctggtcaacacagcgagacacagtctcttcagagtttttctttaaaaaattagccaggtgtggtgacacaggcctgtagtcctagctaatcaggaggctgaggcaggaggatggcttgagcccaggaattcaaggttgcattgagctatgattgcaccactgcactccagcctgagtgacagaacaagaacttgtcacagaacaaaacaagttagccaggcatggtggcatgtgcctgttgtagtcctagctactagggaggctgagggaggagaatcgctggaacccaggagttcaaggctgcaatgagccatgattgagaccctgtctctcaaaaattaaaaaaaaaaaaaaaaaggaacatgggcaagcagggagactgggaggggaaggacaggggagtgttggagtaggtctgtggggaataaagtcagagggataaaggagtcattgaacacaaggctgagccacaggggtgccaaggaccctcccagggaccatagttggggaggattgaggggccttgggggagagagaccgaaaggtgaaagagggcttcactgggcagctgatgtgaccccatctgcccctcctgccaggcgccctgggtggtggaaggcagccgccctcccgaaggttggcccccacgtggggaggtggagttccggaattattctgtgcgctaccggccgggcctagacctggtgctgagagacctgagtctgcatgtgcacggtggcgagaaggtacgcgtggggtaggcgggcctgcgtgtgtgttcatgcctgcagacatggccacagcccttgtggggagcttgggtcttttgagagcacaagtgctccagccacatgtttgttcggcctccaggagagtcctggagatgcgcctttgacctctcagcttccccctcagagccccttcccttctccgcccaggtggggatcgtgggccgcactggggctggcaagtcttccatgaccctttgcctgttccgcatcctggaggcggcaaagggtgaaatccgcattgatggcctcaatgtggcagacatcggcctccatgacctgcgctctcagctgaccatcatcccgcaggtaggagcctggcatgggctggccacactcaccaacggccctggaggcaggccccaccttgttctgtagctttaggatggagactgggaccccagtctcagaggcttgggcaggtggggagggacagacagcaggaagcagagccatcagtgagccacccgtcatggatctggaaagctcagacttaccctgcccagtcaggccctgtcctttgacctcctgggccagcacatggggaaggacccctccaagaaccccttcccccgagacattctgccctggtctttttgcgcagctctaattacatttcactttttctgtctcctccggggtattttttgtttctgccgagtggacactttggagtcagattagtggctctggttcctgcttcaacagaggtcttcgtgattggcaaagctgaggtttatcactcccctacaggcaattttctatctctttggccattgtgtcctctggggagctggaaacagagtgggaatgctgccaccttaatccctctcttcttccctggacctggggcctatggctcctcatagggcctaagctgcctccctctgaggccacgttgtatccccaggaccccatcctgttctcggggaccctgcgcatgaacctggaccccttcggcagctactcagaggaggacatttggtgggctttggagctgtcccacctgcacacgtttgtgagctcccagccggcaggcctggacttccagtgctcagagggcggggagaatctcaggtaaacactgggagtgcagaggtcaggaactgcaaccctccctgggaaaccctggcgggtgctgggaaacctgacaccaatgacacagagatgaggccagcccggatgtgcacagggctgtcctttcgtattgagcatattccgtgtgccaggcatggtgtactgccccgccgactcctcacacaagccccagcggtggtccatgatcccacttcaccggtcagggaactgaggctcagagatggtaaagggcttgacctaagttgcacagctgggagaaggcaggtctgggatttgaaccagctctgggagattccaaaaccctttgaggaagccctctcccctccagagctttcttacagccccagattttatgtcctcagccactgggctatgcactggaggggccagtagtcacctcttactgagtctaaaggttggagatacctatacctgtgctagctgtgtgatttggggctagttgcttaacctctctgtgcctacttttctttcactctaaaaggcagataataacagtccaaacctctttgcattatgctgcccaataaaaaacaaagcaagtcatgcatatgaagctaatgtttttttcttatagccacactttttaaaaaggaaaaacaagcaaaataaactgtaatactataacttatttagcccaatatatctaaaatattatttcaacacatcattgatataagtattagaaatattttgcgtttcttcctacaagtttgaaatccagtgtatatttcacatttacagaatgtctcaatttggactagtcacatttcaagtgctaatagccacatggggccagtggctaccacctggacagagcagtgttagggtcagtgtgatgacaggaaaagcgcttcgcttggatgctcctgtaaaatgtcagcttttcccctcctcccttccctccatcttctcctcctcctcctcctcttccctattttcatttttatattcagtccatactcatgcaccctccccagacctcaaaaactaaaacaaggccaggcacagtggctcacgcctgtaatcccagcactttaggaggccaaggcaggtggatcacttgagggcaggagttcaagaccagcctggccaacatggtgaaaccctgtctctgctaaacacaaaaattagctaggcgtgatggcgggcgcctgtaatcccagctattcgagaagccaaggcaggagaatcgcttgaaccctggaggcggaggttgcagtgagccaagatctcaccactgcactctagcctgggtgaccgagcgagacttcgtctcaagaaaaaaaactttacatttgcccagcacttaacaatattcaaagcactctggcctccactttctcctttaatctttaccatggtcctgtgggccagaaacgagcctccacggtttgaaatgatttcctcgcagcagttcagctggtaaggggcagagcggggactctggctctgtcccaaacctttccttgctgtatcacagccacctccctcacctggacaacattccccaaggcccctcattatcccaagggtgggactcccttgccacccacgcagcccttaagactaaatatgcatcttaagtggctctcacttacataaccacgtgggggtggctggcggacaaacatggtctctccagaccctgtgccccatgactgtctcttgcttgatccattcttctcacctgcttgctctcaacacttcccccagagcatgccccaccccgacacatgccgtgatcagagacagaaatcagctcccctcctccctcactgagcttgtagccactttaagtataacctgtgtcctgtgccagttccaccataaatcagccctgagttctatccggcggcttattctgctgccaaaaccttcattagttgcgggaatgggccagggagagagcccggactttactccggctgtggtgactcacgcctttgggaagggctgaggtatttgtccttggatgtggggatgctgtggcctctggttgggaacacagcctcgttttgtctgctggctctggcttccagagcaggaggctgaaggcgtgtgtcctgctcctcctttacctcctcagtgaccagacacaaagagtccccgggtgttcctctgccctgccattttcttgtcccagaagcagagccctggcctgtattccctatggggtgggaggtgactgcctgaattgtgtgatattaggctcagcaagatggcatcgtgtggcctatttgcaaatatccaagaagagccatgcaagtatgttcttactaaggtgtaaatggctgatagagtgaagcagagaaacatcacggcactagctgaaaagcaaggatggggaagaaagcaccgagagaggaggccaagggtgccaagagcagaccagggatttcacaatgccttttagcactggctcattccccaaggcccctcattatcccaatggtgtccagacctctgctccgttctggagggctgggctgtggcagaaatgggagaagtcagacagaaaaccagtcctgggccactgaggagtgaaacaggtctgggaatgaggcccagaggcaggtgggaggcccccagctggaaatgcctgccttctccactcccagcgtgggccagaggcagctcgtgtgcctggcccgagccctgctccgcaagagccgcatcctggttttagacgaggccacagctgccatcgacctggagactgacaacctcatccaggctaccatccgcacccagtttgatacctgcactgtcctgaccatcgcacaccggcttaacactatcatggactacaccaggtgggacacggaaacctgagcaatggggaacctggtggggccacctggggcatcaggaatgggcagggcagattagggttatctgaacaaggcaatgttcctgggattgctagggcatggcaggcagagcagagtttcccaagatctggataaggggcagaccagagtggggtggcctgggctcaggggtggggtatacaatgacattttcatttttcttcttcttcttcttttttttttttgagacagagttttgctctgttgcctaggctggagtgcagtggctcactgcagcctcagcctctcgaagtactgggattacaggcgtgcaccaccacatccggctaatttttgtatttttagtagagacggtttcaccatgttggccaggctggtctcgaactcctgacctcaagtgatccacctgtctcggcctcccaaagtgctgggattacaggcgtgagccactgcgcccagcttcaacaatgacattttctaacacatggggaagggcacactgggctccacaggcactgtctttgtgcacaggccacttgcatcctgcctcctccatgaggcaatgtaaggggaactggaggcttcatgctgagtcccatcacttcctaagaaacctgctggcagagtgcctgcatgtccctcaccttattggtgtctcacagccactctggtcacagatgaagaagcaactcaagtggcagctggaccgtgacagcaccatgaggagctgagccttgtggggagagcactgtgtctggagtcccaggctgctgtgtgaccctgggcaatttgcaaaacctttctgagcctgtttcaaatgaaaatgatgcttcgtgggattgtcgtagtcaatgagggctgggcacagtggctcacacctgtaatctcagcactttgggaggccaaggagggcggatgacttgaggtgaggagttcaagaccagcctggccaacatggagaaaccctgtctctactaaaaacaaaacaaaacaaaacaaaaacaaaaatttgccggatgtggtggtgcatgcctgtaatctcagctactcgggaggctgacagagaattgcttgaactcaggaagcaaagattgcagtgagccaagattacgccaggacactccagtctgagtgacagagtgagacgttgtctcaaaaaaaaaaaaaaatggtggccaacgcggtggctcacacctgtaatcccaggactttgggaggccgaggcaggcagatcatttgaggtcagaagttagagaccagcctggccaacatggtgaaaccctgtctctactaaaaatacaaaaattagcctctcatgtggcaggcacctgtagtcccagctgctcaggaggctgaggcaggagaatcacttgaacccaggaggcagagtttgcgccactgcactctagcctgggtgcagagcgagactctgcctcaaaaaaaagaaaaaagtcaatgaaagatatttaaactgcaggtgatcctgggaaatgacagtgtcctccccagccccttgctctaattcttgcgctaggccctccaaggatgaggggaggggccatgccctcagaagcttgtggcttccttggagaggcagaccactccctcattgtgccagatgtcaaagtgtggtgctggaggtcgaggagagagggctgggtgactcagaagcctcacgggagtgaactggccctggcctggcaggctgtgctccctagaaactagaggggaggaggaggcaggaggctcagacaagtcttctttgaaggagtatagtgggaataccccaacaggccttcactcactcaagaaacacttgcaggacgatggagtgggaagggtgccatggacagggcaatgggtcagaccttgctctcttggaagtgcccccatgcagccagcagtgtcttgggagccaagctgagaatgcctgatgctaccctctgtctgttccatccctctcctaccctcaccccccactcccatttaggaccccactgggagaagggagggtgggcaggaagtgctgagccctgggtttggaggagggacagggctgggctgagaggacctgttcccaggcctaaccaaaactgtttcattcaccagcagccctagggtgaggggcttggatggaccttggaggttgggagttcattcattctagtggaacaggcagaaattaatcaaataatcatgtgtaaatagggcccataggaaggacgcaaaggcctgtgtgtgcaggccagaaaaaggctatccacacagggtggccaggacactttctcctgtaaggaagggatgcaccagccaggcctgaaagaatgagtaagagttggaggatggaggtggggcaataaggtagggagcgagctgaaaattgcaggcaaaggatataacacatgccccaaggcaggagggtacaggaggctggagtgcgtgggagggaggcagtagaaccaagatgggggtggagaacaggccgcactctgctgcactttgaggaccatgggagagcattcagtccttacccaagagcaatcaaaagccgctgaagaccttgattttggagtcagggttgggatcggcgggaggggagggggggcggtggccaggcagtgatgtcacagacacagtccttcccaggacacatctgggagcccagtaggctgagaaccagaatgcagtcagccccctcccatggaggagcacttctccaggctggggagagccccttcccctcctgccgtaccctggtggagccagcccactggccttgtaccaggtgcactcggtgagtggttggtgggagattctaaccctgggctcaggcctagctgtttgtgtgtgagctggagacccaccgagcagcagcagcagcagcagcagccgcagcagccgccaccagatttgcagcccaagccccagattccagtgtcagcctcgctgcagctggtttcctgccgtgtgcttttgtgagccgacacaaagcagatggatgtgcacagagcccagcgcacaggcccatggctccctgcgcacagcctgctgaagtcctgtgaccccggcaaggggaagggctcattagggaaggttttcagagccctgactagcagagatgaataggaccttgtgtttgatcccagaaactgcttcacttgccagaactaacagaatggctaaaataaccagccttgcaagtgtgcacatgtggtgcggtggctgtgttgggtgggttggcatgtcactgtgggcctgagcaagtacccagaagagcaggattagacgatgtgaccaggtcagggctgatggaaacctgaccacttctctcttttttgactagggtcctggtcctggacaaaggagtagtagctgaatttgattctccagccaacctcattgcagctagaggcatcttctacgggatggccagagatgctggacttgcctaaaatatattcctgagatttcctcctggcctttcctggttttcatcaggaaggaaatgacaccaaatatgtccgcagaatggacttgatagcaaacactgggggcaccttaagattttgcacctgtaaagtgccttacagggtaactgtgctgaatgctttagatgaggaaatgatccccaagtggtgaatgacacgcctaaggtcacagctagtttgagccagttagactagtccccggtctcccgattcccaactgagtgttatttgcacactgcactgttttcaaataacgattttatgaaatgacctctgtcctccctctgatttttcatattttctaaagtttcgtttctgttttttaataaaaagctttttcctcctggaacagaagacagctgctgggtcaggccacccctaggaactcagtcctgtactctggggtgctgcctgaatccattaaaaatgggagtactgatgaaataaaactacatggtcaacagtatatacacagtagtctttttgcacttgttcacaaggtttggggattaggatctttggaggaggccaagaggaagactttctacacatgtacatggttgtagttacctgaacttcagacccaagagctcttggctgcaaatattgccttcacagccaaaattccctgggtaattgccagtagctcctgctctgctgtgcagatattgtaaaacggtgagaaaggccctgaaatctgacctggggcctcttgggaaagctgctgtgaacacctccacgttaatgtcatccctcagccctctatgcctgtttctctagggactgagaagtgcatgatgcttttacttccttgctcatttcgaagtctgttccagacagttcctataaccagtgaggcctccaagtcattcattttcctcagtctagccaaagctgaatgtgtgagcacaaagaagccgagaggccacctcctgcccagagagaagccacccacactcccaggttggcagacaagatgtgaggggtgaattaaatttgttttcttgagcaagccaacaaagagtttcttttctgcaggtcagagtccacctggctggcaccggccttctatttggaatggatctcttctccttgttcctaagtgttctggtctcctctgtctcgctctcatttcctctatctttgtcttggtatgatgtgagtggctgtgggtgatggtggttttctccccaaccctaaatggcttgcagtagatatggatggaggtggatcctttgactggttttttctatatgctctgggtcagcctgtgctgcaggaccatttgttaaaggttaatcacatttttttggcaggctgtttctgcccaggatgtttatgagtatatggaagatgacttccatccttgtgataaagcaagtatgaaagcacaaatgcccaaattatcctgcctctccttggtgctaagaaaaggtctctgctatgctctctgatttattaggccaatttggcttgacgtctgctttgtgaggtgctagctggcctgaaccaacagaaaagcagactcattcagcatcagtatcagctaaagatctggaagtgtaaggctgtgtttcctctcctgtcttgggactttgcttctgagctcattgaggccctgacaggtgctgacaactcaaaggagaggctcagttgggtaaagtaaataggataatcaaaaaatgtggttaataggggatgacctccatctaactggctcagctactccagggaaatgaagccgactgcgtgaactggaaggaaagacgccgcacaaaatatccgtccccaggtgctactgacagggtatgaacgggatgtggaggaggctcaggtggagagagggcccttctaattttcctgcagagcttctggtctctgggactgtccaacaatttgaaccccctatgattagaactgtagtgctgtttaggaagccaaaatgaaggcatataggatcggtcagttaatatttaattttaataatacttgttatgtttgaacagtcagcaatgcacaaagaaaaaatcttcagtgaatgtttacacacagtgtgaacacatgctttaaatatgcagtggaggaggaggggtgaattcacagttaacaaagctaaaaaaaaaatccttgttataaattacacaaagcatataaaaatatttctctgaatgcatagattaagactttaaactcacctaccagcaactgtgcagtcttattccactgcgatacgcagtagtcagttgaccacagaggattttataaaggagaagagagaccagcataggacagagatacatcaaacccacctctcaccagagacaccagtcccttgcttgcctctgtcgctaagcccagaacatgccctgcagctgctcctctggaggccatctcccagccaggggctccactgctccactttaattaatctgggtggctgaaagtgttttaacccaagtaacttaagacatgaattaatagtgaatttatttcctctaggacagaaccagacttaactttattagtaaactgtaactgttttagaagtaaagaaaaaaaaggttactacatctagttaaattcacttccgattggttgaaacacaagggaggggctgggccgggtggctcacacctgtaatcggagcactttgggaggccaaggcaggtggatcacttgaggccaggagttcgagaccagcctggccaacatggtgaaaccttgtctctactaaaatacagaaattagctgggcatggtggcacatgcttgtaatcccagctacttgggaggctgaggcaggagaatcgtttgaacccgggaggcagaggtttcagtgagctgagattatgccactgcacttcagcctgggcaacaaagcaagactccgtctcaaaaaaaaaaagaaaagaaacaccagggaggtttcttctttaaagcacttgagagaaagagggtaataagtaaccttcactctgctatgcaaacactgtacaagggtgagtaagtcaccagcagtaattggtgggatacaattaagtcactaaacagagtgagtccatgaagttagccttgaaaaacatctcaacctcatttcagcatttaggcagcagcaggaggccattatcttagcacaacattctcttctgttgacatcttctgcacgttctcactcaactgtagtgttctaataaaattaagttaacacagttaggaagttgagtttctttggaaactataggcactatggggaaaaagcttcttaagacagcagggatgctcttcgacagctggcttcaaacccctgctctcctgtttgtctaagtgtgctagttcttatttctgaagttaagctgtttgtttcaacaaaacagtggctgctcttttaacattaatgacactgaaggaaaggaaaagaatccttgaatgcattcttctaaaaaattcctatgccatactcaagagcttaatcaggtgttttgtttctatttttcagaacaaagtctggtagactcataactgactttgtgaagtgaattggtggtagtagtagggggatcactaagatcaaacaatttgtttacaaaagcaacagatttcagaattgtgtaaaaatcctaataatttcaaaataacctttatttttgatacaaaaataaagatgctaactcctttagctcagtttcccacaataacctttaaaatagcaacagattcagtctcaaaaattgcttttcatttgtagtggaaaatgaaagtggagaacatggaacagcaatatttgtgctcttctcataggatgcagttacacacacatatgactggaatcacttcagagtaaaaaaaaagtgggctgggtgcagtggctcacacctgtaatcccagcactttgggaggccaaggacaggagcatcacttaaggccagaagtttgagaccagcctgggccacatagtgagaccctgtctctatgggcggggtgggggtggggggcattgtaaaaaagcagttgttcttttagaaggcatcagagagccctctagtgaccacgaaggggagttaatgcagagatgactcgagacagagaagcagtcatgagtgtttacaaaggaaaaagtgagggagggaaagctcttttggttaacagcatatttacaattagttaactgtattcttaaatacttttaacctgagtaacatttataaatatgttataggaaacctcacagtcacaagtcacactagaatccatctgtccagtatctgtgctttccccacaccagaatccatctgtccagtatctgtgctttcccgagtcttcctctctcataagttcccaatgtcagcagagttgtgagcatgcaacaccaagaaaaacgcatcccagcccttcaggtgcactgtcaacaggagtggctagaaataggctccgctctctctcagctgctgcttagacaactctcttacattctggacataaaacacactggatatagaaccttcagcttctgcctctccagaccacttctcagctgttcaaagcttcaagcaataggtttactgtgcaccaagaggcttggaagagtggcaccactgcttgggggtcaggggcttcctaccttggcagaatgatgttagtatatactatgcagtggcaccagaggccctcccgggcatctgaggcatttagatcaatggcttgtccttggcccagaggtgatgcacactgtcataatactcagtgataaaagtccctgctgcattagtaagtcagttttgaagctctcctgttatagcaaggcctttcagtcagtgtggatgcagcatttctgaacagaaaattattttcacttatcatcagaaccagttccagctcctggaaatcttggagtcgagcaacatccttgtcctaaaacaaaaatatgttaaacagattaacaggagccacttgtctccatatgtttggtgcactctattgataccagtatcttgtcttatttcaaaacctagaagaaaaaaaaaaatccctgtggcaggctaagtcagtgatagtgcaactaaggccccaggatgattgggttgcaaagtggaagtccttaaaaacagctcagcagctgcgacagcatgagcacacactgcgaagggagaggcaatgcacagatcagtttcccaggtgccctgagaagccagaagcctgatgtcaaaaacccagagatgtatgaaggaccacacatgcatctatgtgatttgctctgtaactgaacttggtccttcacttgtaaaacagaaggcacatctagtagtgcactaagttaatcctcacagctcactacagaaaccgaaaataggaacacgtgaatgataattcagaaacttctctctggtatcaacttccaaaaatgccagtgtggctggtctgaatgcaatggtgtttacaactagtttgtaagactgtaactggccaaacaccagttacagatgtctttgttccttctccactccactgcttcacttgacttgccaaaaaaaaaaaaaaagccagtgtccctatagactcagtagaaggaaatgattacatttggaaaatcactctttgctccttttctattctttgtttattccctcaactacctcatataaccaaggagggggctaggtatttttcaaatgcaaaaagcagccattcatgcttagacttttcttaccttccttaacagagtattgggtaactttctgatcttctccacttgatctggattaacacccagctcacagcaacacactctgagcaactcttggtaggtgagctcctgtcggtccagttcaatttcaatgaaatcattttctcgaagagatgggttctgaattctcaccttgagtaccagctctagaaaaaaaaggagaaatgttaatgaatagttctggcacagcacagcccatgttgtttaagatcttttccagaagatggttatacttaatcatgccaaaggtctgtgcatgattaacagacctgtttggtgggaaaaccaagtgcagccagcagggtttgctcaggcccagctctgcctctgctggggcagtttcctgcactgtcgtccgtacttctaaggctatggttcacaaagtaagagcaaggcaggggaaaccattccagctatgtagaaggataatttacttctgccattggagctaaggaggcaaagtcttaagaacaggtttgggtatcaaactatacatgaacaggggaagagggaagaaggttggaaagaaggcatgggcaggatgtgagttaccctaaaaagatttaacaattatggacctaaaggtatctgtaaaatatgaaactccttgcaaaaaagacagtaaaagagccaaatgacaagctactaataaaagctaaagtataacttgatttgaatgtagcacaccttcatgaggaaggggtcttggcttattattcataggtctgggatctaagcaatctgctcctttattctgaacctggctgccaagacagcctgagtcaagcaccctgtacatttggcagttctgctttgttccctgtatatgaatcccttgtagcaccccaggtcactgttagcacctacagtagtaactcctcaaaaacaggaagtgagagagttacttccaggaaaaaaggaaaagtaagactagctacaccctatggcatttgactggatttggaagaatcaggatgaacttgtggtttttaatatttttaaaaagttatacatagagaaatattgatatctttcctggctatgtcctctcaacgggcctagaagaaatgatatacctgtagcaatgaggacacctagtgaccacatcctggtgtctgaataccattctcggtgggcccaagtgggaggcaagtttgctgtgtgccctaaataccattctccaccaaaaagaaccagggcttcttggagaaatgactgattccagggttggggcaggaaaagttatgctataagcccggaacatcttgctgccccagaaagtaaggcagtgctccaagaacaatgaagacacatgcaagggacataagaactagcttcaaggggctcccactggccaaatctgggataatttgaataattaaaaaatgatagtaacagattataacccactgaataaaataagaatatatgagtcaatactgatatgaatgaaggagaagggaaagcccttctttacagtaaaataccaactaataagtagagaaagaatgatagaaaatcatatcccacaaaaataattggcctggactcttcaaaaagatcaagatcaaaaatgataaagggtaaagattccagattaaaggaaactaaaacaacgtgataactacatgcaacatatgatcctgggcaggatgcagggggcagaggagtacagatagtccagatagatatcaatagtacagatagtactatttctgtaatagtacagacagtacgtatagtagatgagggaatacaaaaggcaatgtttgagacaactgacaaaatttaaacatggtctatggattacagaacagcattagctcaagattacatttctcaaatttggtcatttgtactgtagttatataagagaatatccagctgggtgcggtgattcacacctataatctcagcactttgggaggctgaggcaggcagatcacttaaggtcaggagtttgagaccagcctggccaacatggtgaaaccccatctctactaaaaatacaaaaaaaaaaaaaaaaaaaaaaaattagccaggcgtggtggcatgctcctgtaatctcagctacttgggaggctgaggcagaagaatcacttgaacctgggaggcggaggttgcagtgagccaagatcacaccactgtactccagcctgggtgacagggcgaagctacgtctcaataaaaaaaagagagaatatccttgttcttaggaaagatataatggaaagaatactgaagggtatcagggtaaaagggcaaaaggtaaacaatttgtgaatttgagtaaagggagttccttatgttagtcatgtaacgtttctgtaagtttgcaattatacccagaatacctcattaaatcccacccctctggacaccaactcccctgttgcagaggctgtttgctgatgaggggttaccttgcatattaaatggaaatgctccagtgaagaaaaatggctggaatgctggcgctggtcctgcatacgtcccattttgaggctccagagacattggtggcttggacgggacagaagaaaacagggagcggctctgactcactggtggctgacaaacaggacccggttttgtgctttctggtgttctgagtatggcagagggggccgacacatcaccattctgaactagtgccaaagaggtgtggtcccggggaaaggtccctaacaggggaggttccccagggggaagcaatggaggtgagccatctgcagggggtgatgcagggggtgtggaggggcccccattctgcatctgggctgaatcctctgctgtgggtgtatagataaaagggaaggctgggttggccaaatagttgggaacaaagggcagttctgactccttcttcagctgggggaggttgtcatcatcatcatcatcatcatcttcttcttccacttaaaaagaagaaaacagaacatttacacagtcctttcaaaattatcaaaacaaggtgtcttttgaaagtggtgtcttttggtatgtgacattggtcagtgtcaggtcagaagaaaaaagaatacttcattaggtttatgattaccatttttatcattatcttaaattttacaaataaaaaaataaaaccttacaatgctgacctccccagaaacaatctggaattactatcttggcacagtaatttgcttttagaaatagaacagttgccgggagcggtgcctcatgcctgtaatcccagcactttgggaggctgaggctggcggatcacctgaggtcgggagtttgagaccagcctgaccaacatggtgaaaccccgtctctactaaaaatacaaaattagcgagacgtggtggcacatgcctgtaatcctagctacttgggaggctgaggcaggagaatcacttgaacctgggaggcagaggttgtggtgagccgagatcacgccactgcactccagcctgggcaacaagagctaaactccgtctcggaaaaaaaaaaaaaaagaaagaaatagagcagttgtttgaccagcattaagaacgtagccaataataccacaagtcttcaatgagtctgaggaaatcaaaagttcccccaaacacagactcacctcccataatcttcctgatttctctccttgatgttaactggactggcatttctccttttgtggtaagaatttctttgtcagctcctgattttaacaggtaagagaccacctgaccatggtttcgtttacatgcccagtgtaaacaagtcctgtaccaaagaaaataatgattgaaaaagaggagaagtgattttggatttcagattctaaacattagtaaataatgtataaacaagcctgttagagttcagctagaaccaggtaaccgggctggtaatctcaacttttcacaaagccgatgagcaaaatatttaatatgcttaaattttgtttttaaatttcatttctggctcctgagaaaaactaacttaacctaggagttttaatttcaatagcctccagaaggtaagctcactggctggctaactccaatgataccgtggaatatactctatcagtatcgctcattagatcatctcagtctctgaaacatatttttctattgctatattccttttcagggactatggaaactcacttcatatgccacctgaagattcaatattatcaggataataaccatctcctatcagcagcttgctctgtcacttaaattattattatgacagcagatattcttgcctgaatcccagttgctcactttctttttccttcttacttttctttccttaacacacacacaaaggatttccaaatttccatttttaaaaagttggcttctctagttctctccagaaggctacaaacatatcctcatctgcgtaaatgtaaggcactgcacacatactttaattcctgaggtacttaaaaaatatacatcaacaaccaaaattcttcacgaacaggttcttctaacatatcagactcatttaagtaaaactaatcactcaatattgtacacagaggaagcaattctgcacactctgaagggctactattttaatactgtacagaaacataattagcatgccagcaaaaactccatcttaacagaaatgaaagattcagagcaactaaatccatccctaggtgccagagctgactgtatattatggaaggaaaatacttttcgcctgtgttttgaaaggtcttctttcaccaactctctaactgaactgagatacatatcttcagagctcttatagccaaatacagaaatgaagattagaacaaatgttcaatattgaaggttagttcactaacctgggaagtataattatttggaaagtttatatgattccaggaaaaagctgatttgccctgggcttaacattagtaacttacagaaagttagcatgtctggctggctgggagcaattccattgatgtctcagagtgacattctacattatggttcattagaattagattatccaggttcctttaaggtgtattccatgatgcaatgacaaaattattgctaatttgggaaaaataagagtctcgttaagtttgggagagaagagtcttgatcaagctccctgaaggcaaggaagtgtttgcttggcatgtattaattaatatttactgaatgggccaggcacggtggctcacacctgtaatcccagcacttagggaggccaaggcaggtggatcactttaggtcgggagtttgagaccagcctgcccaatagggtgaaaccccatctctactaaaaatacaaaaattagtgtgatggtgcatgtctgtaatcccagctactggggaggctgaggcaggagaattgcttgaacccaggaggtggaggttgcagcgagccaagattgtgccactgcacttcagcctgggcaacacagcaagactccatctcaaaaaaaaaaaaagtaccaaatgagtaaactaaggataaagtggaccttgcttgaagtagaaggatccaatctacccttgattctgggcaaactggaaccttgagtgtgtttgtgtgtggatgtctgtggcacaggcttaaaaagtgaacaattataatgataagtgagccctcaaaaatgaatgaagcatgatgagaaaaatatgctcccttttggaaataaaatgctcacttgctagtagtagatcacttgttcgtggcaagcttgagagtaaaggaggtaatttactaccagtgggtctgagagactctgggacaaaccaacttgctaaactaccacccatgtaaagcagggttaagtcaacatagcgtggcccccacagccctgtgccttagtgatcatcatttaccgtccagagctgtgcggctctgggcagccataactcagagcccctgcagccaggtaatattttcaagttcttcatgaaccaagggttatgcatgacacttgaattacaactgatgtgggggaatgattagtgatcaatctaattgatagattactctatctttgaacttcaactccttaagctttacatttgcagtcaaaatatcttattagtgtcagaaactatttcagacctgaggcactgggtgtcattcatcaacagggcatcactcattggtgctgaaattgtgattactgagcaactaagacttgaaagcagtcaccattctgctttgcaaatgcaagagagtacgtttttttgagggtaaccttatattccattatctagcatattgcttcataataagaaaacaacaacaatggctaatacaggtataatgctttacgtgttggacattgttctaaaggcattacatgtattaacttatttaatcctctaaacccatgaggtaatactactgtcaacattccccccattttacagaagaggaaacagacatcagcaaataaataagcaaagcacgcagtacgctaggtggtgatgaagtatgacagcaatagtaaagcagggaaaggcattagggaatgacagaggttggaaaggggcattgtgcaactttaaattgagggcccaggaaaagccttgccaagaaggtgacatctaaactaaaatctgaaggtggtgaggaagcaaaccatgtgatatctggagggaaagcatttaagagagtgggaagacaaaacgcaaagatcttgaatcaggactgtctggtattccagagaaagcaaggaggccaggggaaaaaggtaagcagaagggcaaatcccatgagattagcacagaggtaaggagggaagatgtggggacaggaagtagaaattgtaggaccctgtaggcttttactgagtgagataggagccatttttgagcagagtgaaatgatctgacttatgttttaagtcaggatccctctgaccactgtgttaattaagaagactgtatgatataagcttaggagcaaggacactagtaggaggctattgtaataatccaagcaagagaaacaatggtggctttgtatcagaggtgtagtggtagggttagtgagaagtagtcagattctgactgtatctgaaggtggagctcatagaattggctgactggatgtcggctatgaaagacaggaggcaagcaggaggcaagcagggtgccaagggttctggcctgagcactcctgagaggctgaggactcagaggagcaggcttgaggtggtagagggatgaggggagacttggaattcaatcttggacatgttgagtttgaggggcctattagacagttcctccaattaaatctacaagaggccgggcgcggtggctcacgcctataatcccagcactttgggaggccgaggcgggcagatcacctgaggtcaggagttcgagaccagcttggctaacatggtgaaaccccatttctactaaaaatacaaaaaactagccaggcgtggtggcacacacctgtaatcctagttacttgggaggatgaggcaggagaatcgcttgaacccaggaggtggaggatgcagtgagctgagatcacgcattgcactccagcctgggtgacaagagtgaaactccatctcaaaaaaaaaaaaaaaaaaaaaaacctataagaagcctcttcaggctacctcagaatcacttcactaaacacctcctatggggcagacattgtgtttaggagggtaggtctggcatcagataccaggtttgttttctggctccactagttactgtcaatcctatgaccttgggaaggggcactgtgaaaagtgaggaaacaacttacggtttctgggcctcagtttcttcatctgtaaatggagagaacagtaactatgtccccaggtagttgtgaacaagctaacacatgtaaaacacttagaaccctatctgagctggccgggcacggtggctcacgcctgtaatcccagaactttgggaggcagagtcaggcggatcacaaggtcaggagatcgagaccatcctggctaacacggtgaaaccccatctctactaaaaatacaaaaaattagccgggcgtggtggcgggcacctgtagtcccagctactcgggaggctgaggcaggagaatggcgtgaacccaggaggcagagcttgaagtgagccaagatggcacctggcaccactgcactccagcctgggcgagagtgcgagactctgtctcaaaaaaaaaaaaaaaaaaaagaaccctatcctatctgtgctgcaaagcaagttcaataaatgttagctatttatgcttcatctcattaagggctcacaatactcttctggaacaagtagaaaatgaagcatctcaggcaaagtcccatagctaggcaggaatggaggagaacctgcaggaaagaccaggctccttctacacaacaccgcctcccagtgccaaaatggtaattcacagctttgaaccagaggaatgctgagaaaaggttacatacacaacagcaagtttgcaaagacctgtaaaaaaaaaaaaaaacagaacaaaaaggtagtatccactgtttcctggccttctggacagctgtccaggctgttttctttagggaaattaggtagaaaaaaatttttttttgagactgggatctcactatgttgcccaggctggtctcaaacttctggactccagtgatcctcctgccttggcctcccaaagtgctgggattacaggcgtgagccaccaggtcctaccaggaagatagactttttttttttttttttttgagacagagtctcgctctgccaccagcctggagtgcagtggtgtgatcttggctcatttcaacctccaactccctggttcaagtgattctcctgctgcagcatcccaagtagctgggatgacaggcacacaccgctacccctggctaatttttgtatctttagtagagacagggtttcaccatgttggccagaatggtctcgaactcctgacatcgtgatctgcccaccttggcctcccaaagtgctgagattacaggcgtcagccaccgcgccaggtccaggtaggtagacttttgaggcagtctggaaaccatggttctggtgctatcatattaatagttatgtggcctagggcaagttattctctgtggttgagcctctctccattgtccctttcagttccaaaatggatgattccacttaaaaaaacaaaatgtaaactcacttttttttttttttgaggtagagtcttgctctgtcgcccaggctggagtgcagtggtgcaatcttggcttactgcaacctccgcctcccaggttcaagtgattctcctgcctcagcctcccaagtagctgagactacaggcatgcaccaccacgcccagctaatttttgtatttttagtagagacggggtttcatcatgttggccaggatggtcttgatctcctgacctcgtgatccgcccacctcagcctcccaaagtgctactcactttaactctaagctagcaaaatagtctggctaagcattacctgaatcaaaattttaaattttaaatgcagagagcggaataatgccacattcagtaactttctgttttgaccaccagcaacatcttaagatgagactccttatttaattgggaagaattcaatctgcaggcagacatctaaagtcttgggtgacattctgtatttgaaattgtaataagaaaactggccaggaacggtaggctcacatctgtaatcccagcacttttggaggctgaggcgggtggatcacttgaggccaggagtttgagaccaacctggccccatctctaccaaaaataccaaaaaaaaaaaaaaaaaaaattagccgggtgtgggggcgcgtgcctgtattcccagctatttgggaggctgtggcaggaggatcacctgagccggggaggtagaagttgcagtgagccgagactatgccactgcactccaccctgggcgacagggcaagaccctgtctcaaaaaaaaaaaaaaaaaaaaaaaaaaaaagaaagaaaataatcgataggataaacaaatgagttttccctcaaacaggcaactacaggcagcagcagcaaatcggttgcagtgaaacaacagagaagcagaatggtgatgcaaatgtgtttttttttcctggtcttggctaaggaaatcgtgctagtttataaaattcatatttgctcagttgcttatgcttttagctctgcaagatgcgttctccagaagcacctacggcaaattaactcaacactcgaattggggtgagctccaacgcatagtcgctgagaatcactgcctccagcaccgctctgaccaagtgagccgggagcgcgggggaagggggtagggcaccagagtcccagtgggcgctgccccgagtggaccacgtgggccgggatttgggcaggacgcgctcccgaccgcacgaggcatgggggccagggctggcctcaagagagcacaatctcggaggcccgaggtggcaggcctcgccgtagccaggcgtcccgcgctgggcccaggtcgcgactgactgccccacgccttccgaccggctgccctgaccctaggcctcccccgctccccacttaccagccgttgacctcattttgggagttcacatccaccccgctctccaccagtttctgcacctcccgaatgtcccctaaggccgcggcctcccgcagcctctcctgctgctccttctgctctaggagggcgttcatcttcccacagccccaggcccccgcccaggcccgcctgccccgccccgcccggggcctgtcagcgccgccgccgtcgccgcggcccgctcccggccatggggagggagcgcggaactcgcccgccctgctcgcgccgctgcccgcgcccgccccgggacttccgctccctcccgcgggccgcccctgctgctcccggcccgcaggcccaggcctcctcccgggccgcgcctcccgaaggccggctccgggggaccctgttcagtgtgacaacgctgacccagatattttccgttccgacccggggctccggcgcccgggctggctgtttatgtaactactgcacaatattatatgccatgattcattgactatttttagacttccccaccccgcagtttcaagggaggaggacaagacacatgaaaagagaaaaaagcatagctgagggccagaaaagccttatcctctggtgcaggctgtttaccaggcatccaaaataattggtgggttctttttattgggatttggggtttttttgttattttcccccagtttggttggctccttttccttatctgagccaattcgtgcccagcaggatggggaaatgggctgaaaacgatcctactataatacgcccattattacagagatagattagactcttcttctttttgacagtgcttggggacaattcagttagaatatttatttcaattgttgttgttttacatctcattttagacaggatttcttctaacctggctttcaggaaaaatatttatattgtgctcacagtttatgaactgtaattactgcttacagattgtaattagttactcttcatgaaggccatataaggagaaaagaaaggaaaaacaccaaagaggctttggaggtgtcctggtcctgattccaagtgctctgggaagagctgtggtgtacatgtaaacagcattttgcttcacttcttgcccgatctatctaatgaggctcagagcctcagttggcactgttttatacccagtgggagaaaaaggaaatattgttttgttgagcccaggtgccctgaagagatcctccgatgtggcacaggatggaactttacagatggggtcaagattaaggaaatagccctggggaggaagggaggaaggcctgaacaaggagagatgaaataggaagggataaatttaggcatggagttttcatttccgtctcttggggctgctgggatctgcacagcaagcatttttcttgctacagtttaagaaaaaccaatgtctgtttgtttagtatgatacagtaattcacacagtacacagtgcacaccaggtggtgctgaatataaactgactacacacttaaattgacccccatggcaaattgtaaccctgcttgagcttacattttcatttgttcccccaatttaaattttaattctcacatccagcatgatactctatctgaaactgatgtgtatggcactggatttgagtccttcaacacaatttcagtgacatgggagtaggtagtggcttgttgtttttgtttgcttgtttttgagacagagtctcactctgttgcccaggctggtgttcggtggggcgatctctgagctccttgcaacctctaagtccaggttcaggcaattctcctgcctcagcctcccgagcagctgggattacaggcctgtgccaccatgctcggctaatttttgtatttttagtagacatggggtttcaccatgttggccagtctggtctccagctcctgacctcatgtgatctgccagcctcagcctcccaaagtgctggaattacaagcatgagccaccgcgcctggcctgtttttgtttttttgttgttgttgttttttgtttttaatgcagttaaaaaaaattgttcgtgactgcaccccaaagtctatgagttcttttttttttttttttttttttgagatggaggagtttcgctctcattgcccaggctggagtgcaacagcgcgatctcggctcaccacaatctccacctcccaggttcaagcgattctcctgcctcagcctcctgagtagctgggattacaggcatgttccaccatgcctggctaattttttgtatttttagtagagacggagtttctccatgttgctcaggctggtctcaaactcccgacctcaggtgatccgcccgcctcagcttcccaaagtgctggaattacaggcatgagccaccgcgcccggcccccaaagtctatgagttctctttatgagagtttgtcaaatgtcccttccttaaaaggattatagcatgtaccctacataactgctgtatccgtgaatattagtagatcttcttaaactcaacctctacttactctgatttcagtcttctgtttattatcttcagattaaaaaaaacaaaattttatccacaaacaaaacttctgatcttggatataactgaatgtaacctgctggctgttctattactacttccatttatctctactctgtcttgtctctagggaactacctaactcactgaactgtattaagcatgtgctgtttgccaggcactgttctagtcactgaggatgctgctgcaaatgaatcagagtccttgactttgaagaacagtttatcaggggagacaaggcgaacaatagaatgtgctatgcattacaatagaaacaatgtggcatagtggtagtgagtgtggagacagacgccagactgcctgggtttgtatgccagctttgccactcatataatcttgaatgagttactcaactttcctgtgcctcaaattctgcacctgcgaaacaggaataatagtagcacccaccttgcaggattgttctatggattgaatgaatggatatgtgcaaagcctagacatcttaaacattcattggatcataggtgggttacaacaaggtttacgttaggaaaacttaacctggcagaatgggagggcagtggtggtcaagaaacaaggataatgttcgggtttctggatgattagatggtggtgtgatttattgagatttgggacaaaggatgaagagaaggtttgaggtttggtcatgaattcacttttgaatctgttgacttgaactttctgagaccttttaattactactactctttactatctgctactatcaactcattgccaggtgctgcaggaagtgctgtacatggattatctcatttaatcctcacaacaactcctctgtaaaacaggaccatcattattatctgaggctcagggaggtaattaacttgccccagtgctggccaggcacggtggctcatgcctgtaatcacagcactttgggaggctgaggcgggcagatcacctgaggtcaggagtttgagaccagcgtagccaacatggcgaaaccccgtctctactaaaaatacaaaaattagatgggcgtggcggcaggtgctggaggcagaggttgcagtgagtcaagatctcgccattgcactccagcctgggcaacagagtgagactctgtctcaaaaataaataaataaataaataaacaaacttgcccaatgctatacatcgtagtttgtgatggagcaaggctttgaactcaagttcaacttctgagcctgtgctttcttttctgattttcatttaaatggatatgttcagtaaacagttatgtgaatgggtattgcatttaggaaggagatctgggctggtgatttgtattttggcagtcagcaaagggtgctagctgaagtcatgggaatagaagagatagccccaagggagtctgtgagtgctgagagaagactcctgccaggcgcggtggctcatgcctgtaatgccagcattttgggaggcggaggagggtggatcacctgaggtcagagttccagaccagcctggccaacagagcgaaaccctgtctctactaaaaatacaaaaagtagccgggtgtggtggagcgcacctgtattcccagctactcaggaggctgaggcaggggaatcacttgaacctgggaggtggaggttgcagtgaggcgaaatcatgccactgcactccagcctaggcaacagagtaagactctgtctcaaaaaaaaaaaaaaaaaaaaagactgctgaagacagccaggaatggtggtttgttcctgttaatcccagctactcaggatgctgagacaggaggattcccttgagcccaggagttccagactagcctggacaacacagtgaaaccctgacagtaagaccctgtcttaaaataagtaagtaaataaataatttttaaaaagaagacagccaaagactgaagaatacagatggttcccaacttatgatggttgcagttaggattcttttactttacaacagtgcaaaagtgatacacaaaagtgcaaaaataagtagaaaccttactttgtgtaaccaaacaactattctgtttctcattttcagtacagtatttaataaattacgtgagatattcaacactttattataaaataggctttgtgttagatgattttacccaactgtaggctaattaaagtattctcagcacatttaaggctaggctaagttatgatgtttggtaggtatattagtctattttcacactgctatcaggaactacctaaggctgggcacagtggctcatgcctataatcccagcactttgggaggccaaagacaggtggatgatcacttgaggccaggagttggagaccagcctggccaacatggagaaaccctgtctctactaaaaaatacaaaaattaggtgggtgtgatggcgcaagcccataatcccagctactcgggaggctgaggcacaagaatcacttgaacctgggaggaaggggctgtagtgagcctagattgtgccactgcactccagcctgggcgacagagcaagactttgtttaaaaaaaaaaaaaagaaaaaagaactaccggagactgggtaatttataaagtaaagaggtttaattggctcacagttccacatggctggggaggcctcaggaaacttacaattatgggaaggcgaagcaagcgcctccttcacagggtggcaggagagagagcgagagagcgaaggggaagagccacacttttaaaccatcagatgtcctgagaactcactccctatcacgagaacagcatgggggaaccgccgccattatccaatcacctcccaccagcttcctccctggacacatagggattacaattttagatgagatttgggtggagacacagagccaaactatccataggctaggtgcattaaatgcattttcaacctaatggacgtattgggatctaacccctttgtaagttgaggagcatctgtagtcaacattttaatgacggacagaagagaagaaattctcaaatgagagcagaggagcagctattaatagactagcaggaggaaaagcaaaggagtgggagggtttggagacaagggagtgatccacagggtcaaatgctgcagaaagggcaagaaagaaagggctgaaacacatgaaatgggtttaaccatcacaagcttgctggtgccattgaagaggaaaggtgcagtgaggtggtacaggtagccaccagactttcttagtccatttgggatgctataacaaaataccacaacctgggtggcttataagcaactgaaatttttttctcacaattctggaagctgaaattccaagatcatggtaccagcatggtcaggttctgtcgagggccctcttctgggttgcagactgccagcttctcattttttcctcacatggcatggcagaaggggcaaaggagctctctcgggcctcatttatgaatggcactaataccattcctgaggtctctgccttcatgacctaatcacacctgaaaggtcctgccttttttttttttttttttttttgagacagggtcttgttctgtcacccaggctggcacctgacctaaaaaacaaacaaaaacaaacaaacaacaacaacaacaacaaaaaacctttcattctaagggaagaaattgctatttgcaatatcgtgtgacaaacccaaaaatatgcaaggatgcttcaggtaaaatgatggcacaaagaaggtgatcagtgtgtagcaggtggagggccagggtccagggtggcgttgtggagctgctgaaactggggctgtaagctgaaagatgagtaggggctcgtatctgtaaccccggctgctcaggaggctgaggcaggagtgagaccgtctctgaaaaaaggatgagtaggtgttgcttgctgctggagtggaagagctttccatgcctggagcaacgtagatggtgaaatgcaggaatcaagggtcttccaagtactggaagcagtagcagatgaagttggagaagggggtcagagcacagaccaccttgtggtgtttgaaccttagagtggagatgatggggagccatcgcctctaaggttggaggcgttttgtttgttggtttgtttgtttgttttttgagacccaggctggaatgcatggtgccatcttggctcactgcagcctctgcctcctgggcctccagcaatcctcccacctcagcctcctgagtagctgggaatagaggcgcgtgccaccatgcccagctactttttgtatttgcagtagagacagggtttcgccacatcaccaaggctggtctcaagctctggagctcaagcaatctaccagcctcgacctcccaaagtgctgaggtgtgagccactgcacctggccagttggagcctttcgagcagggatgagacacatctagatttacatttagaaaggtgactgatggctgggcgtggtggctcatggctgtaatacctgcactttgggaggctgaggcgggcggattgcctgagctcaggagtttgagaccagcctgggcaacatggtgaaaccctgtctccactaaagtacaaaaaaaaaaaaaacaaaaaaaacagctgggcatggcggcgtgcatctgtagtcccagctactcaggaggctgaggcaggacaattgtttgaacctggaaggtagaggttacagtgagccgagatcgtgccactgcactccagcctatgcaacagagtgagactccgtctcaaaaaaaaagaaaggtgactgaggcagcaagatagatggaggatggggtcaaggggcccgcactggaggctgggaggctgggaagcagtgagaagacctgtagtaactgcagcttcctttctatattagcttgctagggctatcataacaaaaataccacagactagatgcttaaacaaatgagatttttattttctggaggctatgagtttacgatctgggtgttggcaggtttggtttctctggaggcctctgtctttggcttgtaaatggccaccttcttaccatgtcctcacgtggctttttctctgtgcaagtgcatccttggtgcctctttgtgtatccaaatttcctcgtataaggacgccagtatgataggattatggcccaacctaacagcattgttttaacttcatcatcatcttcaaatgcacgatctcccaatacagtcacattctgtggttccaggaattaggcctcaacatatgagtttggaggtgacaggaacacagttcagcccataacattttcttcttttttgagatggagtctcactctgtcacccaggacggagtgcaatggcatggtcttagctcactgcactctctgcctcctgggttcaagcaattctcctgcctcagcctcccaagtagctgggagaacaggcacctgccaccacacccggctaattttttgtatttttagtagagatgggtttcactatgttggccaggctggtcttgaactcctgatccacctgccttggcctcccaaagtggtgggattacaggcatgagccactgtgcccgaagcccgtaacattttctattagtaacaggtatggaatggggtctggacaccactagccgataagattaagtcatttcccattccatcattgggaaatagccaactcctgtaatccatcaaaattatctgtaaaatgggctttgtgacctgttaagaaagactacttttacctctggatcccaagacatagcagagaatctgatacagatcacactggggctcactgcattaatgaaggatgaatgaagcaattcattatctgtagtggtaatgcacactgaactgtggcttgtcctcagactttagaaaaaagagagttgtagagtaagacttgcctggtgtatgacagggccaggcgctctcacctctgtgattcaaaggcatttaatactttctttttgagacagggtgtcactccattgcccaggctggagtgcagtggtgcaaccatgtctcactgcagcctcgacttcctgggctcaagtgatcctcttacctcagcctcgtgagtagctgggactacagggatgtaccaccacatccagctaattttttgtattttttgcagaggcaggattttgctatgttgcccagctggtctcaaactcctgggctcaagcaatccgcctgcctcggcctcccaaagagctgggattacaggtgtgagccaccatggctgggccaagtattttcatttcaagaccaaattgtagttgtgacatatttgtctcccataggtcaggagctcctggagaaccaggttttatacgtctgtctttgtattcccagccagtaacccaggtcctggcaaagagcacatgcaccattatagtttgtggaatgaatgagataattagattaagaacctgtgatgggcaggaactgtaattttgcaatctggttgtgtgtttgcggttcatgatgtgtgcagtcctgtttgtttgtggttcagtttttttttttttagacggagtctcagtctgtcatccaggctggagtacagtggtgcaatctcgacgcactgcaagctccgcctcccgggttcatgccattctcctgcctcagcttctggagtagctggaactacaggcgcccgccaccatgcccggctaattttttgtatttttagtagagacggggtttcaccgtgttagccaggatggtcttgatctcctgacctcatgatctgtctgcctcggcctcccaaagtgctgggattgcaggtgtgagccactgtggccggcctttttttttttggtggtagtaacagtggagagccctcaataaatgcttcattgggaaaactgtaaccaacagctgagaactgcctcatctcactgctaaatctgtaaattgattttcttctttcttgtttcagtggagaagatcctttctcctatcaaaggccagaggtttcaaatatgccctggagcctaacccattactttttttttttttttaagacacagtctcactcactctgttgcccaggctggagtgcagtggcgcgaccttggctcactacagcctaagtctcttgacagtccactgtttaaagcgatgctcctgcctcagcttcccgagtagctgagatcacaggcgccaccaccacgcctggctatcctttgtgtttttagtagagacagggtttccccatgttggccaggctggtctcgaacccatgacctcaaatgacccacctctgcctcccaaagtgctaggattccaggcgtgagtcaccacgccaggacccaacccgttacctttttaagattttaagtcattaactatccccttcttttattttccacctctctactggaatatccccaacattaaacattctctcatttcctacgtttggggtttttttttttttggtcttttctttttttttcctttttgtggagaatggcgtcttgttatgttgcccaggcaggtcttaaactcctggcctcaagctatctccctgcctctgcctccctaaagtagtgggattatggcgtgagccaccatgtctagcctctaatttcctatcttcaaaaaggctccagccccacttggtggctcacgcctgtaatcccagcactttgggaactttgggaggtcgaggcaggtggatcacctgaggtcaggagtttgagatcagcctggccaacatggcgaaactccgtctctactaaaagtacaaaaattagctgggcgtggtggcgggtgcttgtaatcccagctactcaggaggctgcggcaggataaacttgaacccgggaggcagaggttgcagtgagccaagatggtaccactgcactccagcctgagcgatagctcaaaaaaaaaaaaaaaaaaaaaaaaaggcttcatgtcccatacctcctttgagttctcaccctattttgctgctttccttcttaaaaagaggtgtccacgaccgggcgcggtggttcacgcctgtaatcccaacactttgggaggctgaggtgggtggattatttgagctcaggagttcaagaccagcctgggcaacttggcgaaaccccgtctctaccaaaaatacaaaaacttagccgggcgtggtggcatgcgcctgtagtcccagctactggggaggttgaggcgagggggtcgcctgagcccgggaggttgaagctgcagtgagctgagatcgtgccattgcactccagcctgggtgacagggccagacccagtccccccaaaaataaaagtgttgggcttgttatcaatgtgtagtgccttacattgtataaactcatttaatcttcacaatagcatcgtggctgggggccgggggaggactattgtaaaccccattttacagaaaaggaaacaaaggcacagagcggcagagctgggattacgaacccaggcaatctggctttagagaccatacccttaactgtgctaaagcattatcccaacatacgttgatatatttgtgactttatttcttcagcgattatctcccctcgccaatgcacaggtctgcgggagcatggactgtctgaaaggttctgagtttagctttaagcacagtgcctggcacataccatttgttgaataaatggatctacctatctatatatatgtgtgtgtgtgtgtgtgtatgtgtgtgtgtgtgtgtgtgtgtatatatatatatatatatatatatattttttttttttttttttttttttttgagatggagttttgctcttgttgtccagactggagtgcaatggcgcgatctcggctcaccgcgacctccgcctcccgggttcaagcgattctccagcctcagccccctgagtagttgggattacaggcatgcgccaccacgccaacctaattttgtatttttagtggagacggggtttctccatgttggtcaggctgatctcgaactcccgacctcaggtgatccgcccgcttcggcctcccaaagtgctgtgattacaggcgtgagccacctcacctggcctactggatcaatatctttttaaaaaattccacactgggagacatttggtgtaggactgaatccccgtattttagaagccgccttgtctcttcttgcctcgatttcccatcctgttaatcaggagactcagggcgggaggacaaagccaggtgcaagaggcgtgagcacagcgactaggaaaatggagtcggaagccgtaatcttcagtttcctccgctgcatgaggcaccatgtgcaccacgtggactaaaggagacactttctccattttgaagcggtgtccaggcttcaagacctaggctccaatttctcaccgtgaagaagctcgggaaaaccgggcgcttggggaggcgcgcgggcagaggctacccgtccccgcggcctctagacaggggcggagtccctacccggcctccgcgggccccgcccccggacggcggaagccgagctcgccctctccgcccgggcctgggcgtgtcccacgggcgcacggcatgctgggaaggcgtccgcgcggcggccattttgtcttgtcggctcctgtgtgtaggagggatttcggcctgagagcgggccgaggagattggcgacggtgtcgcccgtgttttcgttggcgggtgcctgggctggtgggaacagccgcccgaaggaagcaccatgatttcggccgcgcagttgttggatgagttaatgggccgggaccgaaacctagccccggacgagaagcgcagcaacgtgcggtgggaccacgagagcgtaagtcccgcgggccttggcctgagcccgggctccgtgggggaggggagcgggcgcgggctgtggccctcctggccgcggcgcgatgtggccagggccgcacccggggtcgagcgtctgacccggtgcccatggagccaggagggaggatgctgtccggacccggggatgggggtgatttggttttgttgttctagtatcaagggggtccgggagagcccttggcataattgaaaagcaccttgatgaggcggggaaacgcgggaaagaaggatagcagcgtcttattaaatctagcggctccgaggtttcacctcattatgaaatagggagaagggcacatttttctatagtttgggttgaacgtcgtatttagactaaaatttctgaccaggattcatggtaaaaatcgtggcggtattttatttaagtaattacagcatgacgcttatacggggaaatagaaatgtaaaagaagtcgtttacttgttagggtttaccgtgatgatttacaagtattgttcgttaacagtattctaagaagtcccttatagaggcagctgtcaaggttttttcttccacataaaactcatttgatgctcttagcccggggagtaaaggtaaatattataaccccagtttcactggtgagacttaaaaaggctcacccaaagtcttggcaactgaggaaactaatctttgtagttctgttagctttccacaatcctatgaaactggttctctgcacctactgtagcatttcaagtgttttgatctagttttgaacatgcagtgtaatgtttactttaggtcttatctggagaatagatacagaatttaattttactttgaggttataatctaacatgctaattttaaaacaattgctaatcaaaataggaaggaatagttcaggtaatgcatgcttctttagaaaactgttttcttactctttttaaacgtaggctttggttaaggtaaaatttcttttttgcagtgtaggaaagcaagttggtgctagatgactccttttaggactttaagaaagagtaagtttggctcaagttgtgttggggtgctaactgattccaaagtagtatgaaacattcttagagtagaatttattgtttttaagaggtgggttttttgtttttaacatttaggctccccatccccccgaccatttgtcacaataggagactaaggaactgcttaccttgaccatctttcttttgtaggcatctttgttatagcgaagtaactttttttttttttaactacctgactctgtaacctttcagtctaaactttgcaaatgtgttaggaataacgctcaaaatcctaagtaaggtaaaaaaccaaaacattatggcgatttggcttatgttcaataggttatttgtatattttgaattcaagagaaaaatgctttccattgcactccttatcagttggaacagccttgtatctctgcacccttgactttgaacacgttttagagaaactgttttctttcccggggtaatttgttgccacattgcattgtatgtgatgggtttatgactcttcaatgatgaggccctcagaatagcaatttaggttttatgtcatctcagccgtaatctgctttgctttcagttttagtacttttcactaattttaactttcagtgtttattactaaagtatttaatgccttaatgacagattgcacttcactctagattgaaggatttcaagtcagttactggcatttcagattgatatctgcagggaaaatgttggtagtgttgagcaaaaacaaagcacatggtctcatctaaataggtggaattattgtataatgaagctggggaagctgttgatatcgtttccgggtcatctgcatattcttgtactgttggctgttagtgctaaacctgcagggatgggcaaacccattatatgctgaaaaggagtcaccttttctatagcctaatattttaacatatttttgcattcctgttctatctggaaatttttcttggccatacttgcattaaatggaagaagccatttcagctggatggggcccttgtttttttttttggaatagagataaataccaaaataaggaaaggaagcaaccattaattaaaagacagttgccgtggcatctgtaagtatttaacagtcaaaatgctaactttacctagtattaaaggtagtccctagatagctgtatttgacctgtggaatttgttttaaatgcatatttctgtacttcaaccccttcaactccccttcccagagagtcagattctgtctgtcttggggaagggtcccagtatctgcattttttatggctcctcttatgcattcttttttttttttttttttttttttgagacggcgtcttgctctgtctcccaggctggagtgcaatggcgtgattttggctcattgcaccctccgcctcccgggttcaagcgattctcctgcttcagcctccccagtagctggaactacaggcgccctccaccacgcccagctaatttttatatttttaatagagatggggtttcaccatgttggccaggatggtctcgatctattgacctcgtgatctgcccgcctcggcctcccaaagtgctgggattacaggcgcgagccaccgcgcccggccggctcctcttatgcattctaaagtttgtgacctactgtttcctgacccatcctgattagtcctgggcttttaattgtgcatatctgcacaattaaatcttaattggtattaatttggtagtagattctaatactgtacttttttctccttttcatgatgggtaataagtgagcaagcagcacttgcgaagcgcagtttcaagtgaaggatgcatctgtgatgcaaaatcatcgaccatttatttgtaatggtgtgtatgtaaccttcaccaaggtattttactggggctagtgcttttacaggcatttccaactttgtagattgctacctctggatctgagaaactgcagctaaagtgaagtcggctttaatactgtttcatggattcattggtacaccctcccaccgtgtttatttgtattttgcaattgtttgagattattgttttggttttttgcactaagcaattgcttggttaatcctaaacaaccacagtgatgaggaaagcatgtgattgtaactaactgcctagggtgagtacctttcagtgagggtttgatttcagtgttagccagagaaggcactagtagccatattattagaagattgtagtaaattgtaaagtctgatcgggagttttgttattttttatgtagcaagacagaaattttgtagttcaaattgaggtttttatattctagatctcaacctgaaaatgaaattacttaatcattaacactgattctaatatctgaaatgagttttcttccatttatcaaactcaagcctacccttccttccatgaaggtttaacatgaaggtttaataatttatgaaggaaattgaactatgttcttttctaaaatctttggaatgttagcagatactgtcattgacactgaaaagttgtttagaaaaggaaaaatagctaaagcttctgtccacattttttacttgtatactttttctttttgctttaaaaatgttcagaatttgggagcaaaaattgaaagcaaaaaactagtaattataatgcatgatggcatctattaatatgtattttactagttttcattcagagtcaccaaaatgttcatagtaacttactatgttactatggagtaagatagaaaagcattttctaccctgctccctgcccccccccctttttttttttgagacagagtctagctctgtcacccaggctggagtgtagtggcatgatcttggctcactgcaacctccacctcctggcctcagcgtcccgagtaattgggattgcaggtgtgggccaccacgcccggctaatttttgtatttttagtcgacagggttttgccatattggccaggctggtcttgaactcctgacctcaagtgatcggtccgcctcagtctcccaaagtgctgaggttacaggcgtgagccactgcgcccggctggcatttcctaccttactccatagtaaaatagtaagtgttggcttctcagaattgccagcagtccatgtgttatatgtgtatgtaattgctatttgcttttcttcccaaaacatacagaattagagtgaatagtataataaattgaactccccatgtacccatgcccaatttagcaatattagcacatagtcaatattatttcctctgtatcccttccattattttgaagcaattctgttattgtcaaccttaaagcggtcattgtatatctgtaaaatacaaggactttaaaaaaaaaacatagccgaccgggcatggtgggtcacctgtaatctcaacattgggaggccaaggcaggcagatcacttgaggccaggagttcgagaccagcctggccaacatggtgaaaccctgtctctaataaaaaataaaaaaattagctgggcgtagtggtgcattcctgtaatcccagctactctggaggttgaggcaggaggatcctttcaacccaggaggcagaggttgcagtgagccgagatggtgccaccacagtccagcctgggcaacagagtgacactctgtctcaaaaaaaaaatagaataaaataaccacaataccataatcactgaaaattatagtaaggtatttcgtaaatctttggttgctttaggaaaattgtgtgtgtgtgtgtgtgtgtgtgtgtgtgtgtgtcattatatatgttattagccttgatttcctcacaaaaggagaaggtagcttaagtttgtaaatttgacttttttgctaatacagttcttcgttttatgaaatattttctctttttttttttttttttacccccgagatggagtcttgctctgttgcccaggttggagtgcagtggtgtgatctcagctcactgcaacctccacctcccgggttcaagcgattctcctgcctcagcctccagagtaggtggaattacaggtgcatgccaccatgcctgactaatttttgtgttgttgtagagatggggtttcaccatgtttgccgggctggtcttgaacttttgacaacaagtgatcctccctcggcctcccaaagtgctgggattacaggggtgagccaccatgcccagcctttctcttcatttcttatagtaagttaggaaaattgttgtattcatttatccaacaaaaatgtattgctcggctgggagcggtggctcacgcctgtaatcctagcactttgcgaggctgaggcgggtggatcacctgagctcaggagtttgagaccagcctggccaacatggcgaaaccctgtctctactaaaaatacaaaaattagccaggtgtggtggcgcacgcctgtaatcccagctactcgggaggctgaggaaggagaatcgcttgaacccgggaggtggaggttgcagtgagccgagatcacgccactgcattccagcctgcgtgacaggagcaagactccatttcaaaaaaaaaattaaaagtattgctcttaggtagataacagcaggatagtacagatacagcacttggtcctaaagagccatcatgtattggtgacagtaaatgcactttttttttccaatggggattattccaattgaatgtaaacgcatttccataacagaatatgataaatcctaccattgggaaaagtaaaattgacccttgaacaacacgggtttgagttgagtgtgtccatttatacgtggagttttttcaataaatatattggaacattttttggagatttgcaacaatttgaaaaaacttgaagacgaatcacatagcttagaaatatttttaaaatttaagaaaagataagtacatcacaaatacataaaatagatgtatatactagtttatcattttcctaccacaaaatacatacgaatcataaaaagttaaactttataaaaacttatgcacacagtacatggtgccactagcagtccagagaaagtaaagcttgagtaataactgcataaaattaactatagtacatactgtaatactgtaataattttgtagccacctgttgctattacagtgagctcaagtgttgccaggctccacttaaaatgccctatgacctgtgactcttgataatctctgcatgagcagttggtgtctaaagtaaattgcatatcacagtaaaaaattatcccttggttcttgtgtattttcatcattgtttattgcaataccgtataaacttgttgttttgctttttgttgttgttgtttttgagacagtcttgctctgtcgcccaggctggagtgcagtggtgccatctcggctcactgcaacctctgcttcccaggttcaagcagttctcatacctcagcctcccaggtagctgggattacagccgtgtaccaccatgtctggctaagttttgtatttttagtagagatggggttttgtcatgttggccaggctgggctcgaactcctggccttaagtgatccgcccaccttggcctcccaaagtgctgggattagaggtgtaagccacagcgcctggcctatgtacaataccatgacctttgaataacgccctgagacccatacgaagtgcagctagtgacattggaagtgctccgaagaagcagaaaagtcatgacagtacaagaagttaaattgcttgatatgtacgatagactgagatctgcacctggggttgctggcatttgagacaattcatcttttgtatacagatgacctaaacttagggtattgataaatacagcactgtaaatgtgttttcacatttttttctctagcttacttatagttatttttttccctaaacattctacagtgcacatctctagcttactttattgtaagaatacagtatatagccaggcacggtggcttacgtctttaatcccagcactttgggaggccgaggtgggcggtcacttgaggtcaggagttggagaccagcctggctaacatggtgaaaccctgtctctactaaaaatacaaaaattagccaggcgttgtggccggtgcttgtaatcccagctactcaggaggctgaggcaggagaatttcttgaacccgggaggcggaggttgcagtgagccgagatcatgccaccgcactccagcctggctgacagagcgagactttgtctcaaaaaaaaaagaatacagtatataatacaaataatatacaaaatacgtgttaaccaactgttagtgttattgtaaggcttccagtcagtggtaggcttttgatagttaggttttaggggagttagggtcagtaactctcttagttgttataaaggaatacctgaggttggataattataaagaaaagaggtttatttagttcagttccccagactgtacaagaagcattgtagctggtacctatctggtgagggtcccagactgcttccactcatggcagaaggggagctagcatgcgcaaagatcacatggctagagtgccaggctctgttcaacaaccaattttccagtcaactaagaatgggaattcactcccacaagaatgttttttttgggaccaaagaaaccacatccaaaccatagcagtgccccagccccccgagttcaaaggtcagctgtatagtgtacacaggaaaggagtgcataacccagattgggatggatactcaggaaaggcctgtcagacaaagtggtctttaaatacatttacctaaaggattggcaggaattagcctgagggagaggagagagaagacaccttaccagcctgaaggaagagctggagaaaaatcggtgaatttggcaaattttaaatagtattgtagtgtgtatgtttttgttgggtggggtagtgtagataggtaggcaagaacttggttttaaatagtttttataggccgggcgtggtggctcacgccagtaatcccaatactttggaaggcagagatggtggatcacgaggtcaggagatcgagaccatcctggctaacatggtgaaaccccatctctactaaaaatacaaaaaaaaaaaaaaattagctgggcgtggtgtggtggcaggcgcctgtagccccagctactcgagaggctgagacgggagaatggcgtgaacccgggaggcggagcttgcagtgagccgagatcgcgccactgcactccagcatgggcgacagagcgagatctgtctcaaaaaaaaaaaaaaaaaagtttttataagccttgttgaaagtttagattttattacattgggaaataactgaaggcttctaagcagaagagagatgtttactaactggctgctgtggaagattgattgaaattttactagaagtttgtgtaggcaataaatagtgaatcatacctgcaaaggtatacgtaataaaattaaaggcatggaaatgaatgtgtggtcgtggtataactgaaacataaagctatatgttatcagggacataatttttgttataaattcttttattaaaaattatttctttgggggtttatctttaacacagtgaattgaactcttaggtaaaaaaaaatatttatagactgtcataatcagaattaaactattaatattgaggcagaagtgacaaaagactacagcgtgtagggttggtttttgtttttgtttttttggagacagagtcttgatctgttgtctaggccggagtgcagtggcgcgatctcagctcactgcaaacctccgcttcccaggttcaagcgatgctcgtgcctcagtctcccgagtagctggaactacaggcgtgtgcctccatgcttggctaatttttgtatttttagtagagacggcgtttcgccattttggccaggcaggtctcaaactcctggcttcaagtgatctgcctgcctcggcctcccaaagtgctaggattgcaggtgtgagccactgcagctggcttgtgttccttttttttaaccaataaaatttccaggtattcctggattttaaattaatatttgtatgtgtatggcatttgaggtattccagtaatatgtcctgtttcagaatacagtaagtctgcatttaacgtcgttaatgggttcttggaaactatgacttcagttgaaatgacatataacaaaagttttaccatagactagttaatataaagaagagttaggtttctgtggcacattctggttacagaaacataactaaaaagacccaaaacatttctgatatcaaacattgagataaatttgaggtatacatacatttaagaaagatgaataaaagcgaggtaattacccagtttttggtgaatcagtgagtgatggcaattttagtggtggtgagttaagtcaaggaataaatgtttacaacttgaacattgtcagaagcacctcctacctccattcagttccaacacaataataaagatggtaaactcaccacttttggactatgctgtttattttcatgcatttgtatgattatcatatgctttacagacttttattttacaataatttcattgtaatatacaatatattcattcctttccagcctccttattccagttcagggtggtgggtggccagagctgatcccggctgcccaggatgcaaggcaggaactaaccctggacaagatcccctcccatcacagggcatactcacacacccacactcacccagactgggacttaggcatgccagttcacctaccgtgcacagctttgggatgtggaaggaaaccagagtactgggagaaaacccatacagacatggggagaacttgcagactcctacacagttagccccagctgggaataattttttttcccctcatcacattattcaaggacttactgtatatagtaattaggattggctatttagatttttaaaatttaagtccctgtcagttttactgtttccaacatgagttgtgttgccagtgtttagataatcagaagtatatattgaatataaatacattatatatatatatatatatatatatatatatatatatatatatatatatgtatgtattttgggggtggggaggtggggacagtgtctggctctgttacccaggctggagtgcagtggcacaatctcagctcactgcagcttccacctcctgggctctagcagtcctcccactgcttgagcaggctcctcccattccagcctcctgagtagctgggactataggcccgcaccacccctggctaatttttttgtattggtggagatggggtcttgccacgttgcccgggctggtctcgaactcctgagcttaagccatctgcctgcctcagcctcccaaagtgctgagattacaggcgtgagccaccacttccagtctattatctttatgataagcagtttaacgaaaatagtgcagacaggccaggagttcgagatcaaccatggtaaaaccccatctctactaaaaatacaaaaattagccaggcatggtggcagttgcccataatcccagcttgggaggctgaggcacgagaattgcttgagcctgggaggtagaggtagtgagccaagatcgaaccactgcactccagcctgggcgacagtaagactctgtctccaaaaaaaaaaaaaaaaaaaaaaaaagacctaaaaatagtgcagacagcattgaaaatatttgattagctcaaaggagaattgtattgcttagtgttggatctaagtagatatagaaagacaaaaatcattaagatgtccttaatgggcctggtgctgtggctcatgcctgtaatcccagcactttgggaggctgaggtgggcggatcatttgaggtcagaagtttgagaccagcctggccaacatggcttaacccccatctactaaaaatagaaaaattagccaggcattgtggtatgctcctgtaatcccagctccttgggaggctgaggcaggagaatcacttgaacctgggaggtagaggttgcattgagccaagatcgtgacactgcactccagcctgggcaacagagtgaggctctgtctcaaaaaaataaaaataaaaactgttgatgagattgaacacttgtcactagtgttgccttaaatttattaagaggataagttatgattatgtaggtatttagagagtttgcatgggtattaatctgtaataagcatttatatcttttggggattactattaaatgaagactgctggtattccaaaacttgagcagttctcatgattatatccaaaagtaagaaacgaattctctgggtttattctttttttgagacagtctctctctgtcatccaggctggagtatagtggtgcgatctcagctaactgcaacctctccctcccgggttcaagcgattctcccacctcagcctcccaagtagctgggattacaggcacttgccattatgcctggccagtttttgtatttttgtagagacagggtttcaccatgttggccaggctggtcttgaactcctgacctcaggtgatccgcctgcctccgcctcccaaagtgctgggattacaggtgtgagccaccacacctggcctctctgggtttgttcttattatcattattgatgactttatttgaagaacccaaatatgttcttcccattttttcggatcacttgttaatatttttagttaaaatcattctctggggagagttaaaagaagcagtccaggtagctggtttattgtgtagagtaacagataattctgatgtaccattaaatggtaaagcaggagagttggagtggaaggaacactcagaactggattggggaaatggaatctagtctggattctgtagatatagctggatgctgtcagggcaggtcatgtggtctctgatggggtgattggactagattaggtagcttctggttagcccacagacaggcatgtgttatttggtttacacagtgcctaaaaacatttaaaataataatgtgcagcggacaggtctacggaaacctacccccagagtctgaagaagctgagaggccaaagaaagaggctgacaaatccagtgtcttggaaacatgtaatagggacctacgaacagaagccaggtctgtgtcttgggcagctgctggcgtcaagacaagatgtcatatccccagacccagggcttatatgccatagggaaagggtatctgtgcttcagaaggcatgtgtaggataattacttatgggcaggatttatgttaagtacaaaatcatcgaaattgttttgacctaagggcaggatttacagtaagtacatgttcttaacacaaggaacagtagataaagtagaaatcttaggggcattcctggaattggagttaatcggaagtcagcctggcactttaacacccaagatggagttgctttcgcttttacatacaggctaacacctttttcttccaatttagcaaatgtacacagtttaatctttacaatcccactataagaaatttattacctccttatttatttgagtcttgcccttttcacccaggctgaagtgcagtggcatgatcaccactcactgcagcctcaacctcctgggctccaacgacccttccaccctagccacccaagtagctgggactacaggtgtgtgacaccatacctggctaatttttttcattcttttttttttttttttttagagacaaggtcttactatgttgcccaggctaggctcaaatgatcctcctgctttggcctcccaaaatgctgggattacaggcataagccactgggcccagcctatctccttttttaatactatgaagaaaccaaggcagaattacgacctctggttctttttctttttttcttttttagacaggttgcgttctgtcaccctagctggagtgcagcggtgtgatcacagcacactgccacctccacctttgaggctcaagcagtcctcccatctcaacctcccaaagtgctgggattacaggcatgagccccgccaggtacccctggttctttagcagataagcaacggcgaagattcattgtgctgtgttgcagtgtaccaatttcacatgcttgagagtcaggagggactgtagagatgtgtttattcgtttttttgttttttaatggtgaacctttctgaggatcatagacgttgtgtcttacctaccttaaacttacgaaacacttaaattggtcatgaggctgttagaagtcctattgaaaacaataaaattaatctttagatagaataatctccaaaaccctagaatatattactgtaaaaatgggaaatagaaatgaaatgtttataagtaaagataaaattcacagtaatagtaaaactttgtttttttttttttgagacagagtctcgctctatcacccggtggtgcgatctctgctcactgcaagctccgcctcctgggttcacatcattctcctgcctcagcctcctgagtggctgggactacaggcacctgccaccacgcctggctagtttttttttttttttttttttgagacagagtctccctctgtcgcccaggctggagtgcagtggcgccatcttggctcactgcaagctccgcctcctgtgttcacgccattctcctgcctcagcctcccgagtagctgggactacaggcggccgctaccacgcctggctaattttttgtatttttagtagagacggggtttcaccgtgttagccaggatgatctcaatctcctgacctcgtgatccgcacgcctcagcctcccaaagtgctgggattacaggcgtgcagccagttcacagtaatagtaagacttttcatgtgtgtgaggatggcacacaaaatttagtttttaaattattttataaccatacagtttatggctataaataatagattctggcaataacttttactaaatatagttgtgtgaaatttttgagtcttcaaaacagggttaatataattgaaaggttaggtcacagtaaaagtggcataattgttgccacatcctccctcccccaaataaactctcaaagaaatgtttataaaaatcgagtattggcattggtattttactgtgttgcatttaaagtgaacacaaagttgaacaaaatggatgttttaagaattagaaaatcatatggcatcacaagcagtggaacttcagaaataatttttaaaaacattagctttagatagcatatagtctttttaaaataaactatttgtgacaacaatgtttaagttacaaagaataatcttttttaaaactttttttttttttttgagatggagtttctttcttgctgcccaggctagagtgcaatggcctaatctcagctcaccgcaacctccgcctcccaggttcaagcaattctcctgcctcagcctcccgagtagttgggattataggcatgcgccaccatgcctggctaattttgtatttttagtagagacggggtttctccatgttggtcatgctggtctcaaactcccgacctcaggtgatcctcccgccttggcctcccaaagtgctgggattacaggtgtgagccactgtgcccagcctttaaaacttttattatgttcttagagacgagttgtcacttaatgttgccagggcctggagtacagtggctgttcacaggtgtggtcctagcacactacagcctcaaactcctgggctcaactaatcttcctgccttagcctcccaagtagctggcactacaggcctgcaccactgtgcccagctgcaaagaataatcttaaaaatcaagtataataacttggaaagaaaacagtagaaagatactaagacataaagctgtatcagagtaatattggcataaaactagtggcttgcctagcttaaacttatggaacaatagttttaaattggtcatgaggccattagaagtcctattgaaaacaataaaatgagtctttagaaagaatctctccaaaaccctagaatgtattattgtaaaaatgggaaatataaatgaaatttttataagtaaagataaaattcacagtaatagtaaaactttcacgtctgagcgcggtgaggcctgtaatcctagcactttcggaggccgaggcaggcagatcacctaaggttgggagttcgagaccagcctaaccaacatggagaaaccccatctctactaaaaattcaaaattggccgggtgtggtggcgcatgcctgtaatcccagctacttgggaggctgaggcaggagaatggcctgagcccaggagggagaggttgcggtgagccaagatcataccattgcactccagccagggcaacaagagcgaaactctgtctcaaaaaaaaaaaaaaagaaaaaaaaaactttcgtgtctgtgaggttgtttaaacatgaatatttagatatgttttatgactttaatcctggatgcagcttatggaaccacattgcttcaaatgagtgtaaagccgttgaggaaaaaaaaggcctatttcagatttagcacccagtcctgtctagaaagaactttcaggtttaaatttaacactgcctttttttcatttcctttcccttttccttttcgttttccttttgcctttcctttctttttctttttctttttttcaagacagggtgtgatagtgttgcccaggctggagtgcagtaaatagcacaatcatggctcattgcagcctcgacctcccaggctcaagcaatccttctgcctcagcctcctgggtagctgggactgtgccaccatgcctggctactttctgtattttttatagacatggggttttgccatgttgcccaagccggtctcaaattcctgggctaaagttatcctcctgccttggcctcctaatgtgttgggattacaggtgtgagccaccatgcctgaccaacgctgccttttcttttcatgtgttatagttgtgcattaataatctccccagagctgggcacagtggttcacacctgtaatcccagcacgttgggaggccaagacgggcaaatcacttgaggtcaggagttcgagaccagcctgaccaacatggtgaaaccctgtctgtactaaaaatacaaaaactagctgggcatggtggcacatacctgtaattccagctactttggagactgaggcagaacaattgcttgaacctgggaggcggagcttgcagtgggctgagatggtgccactgtgctctagcctgggcaacagagtgagtgagactctgtttcaaaaaaatatatagtaataatccacctagtaacagtgaagttttgtgtgaaggaaaggtgatattttggaattttgatttacatggtttgatttgtagtgttataaaattaaatttgggatagagcagttttggaatatatctgaaggagttacaaaagtaccagtgggagagaattaaacattggttttatgttaatagtttttccccatactgtgggaacccaccaagagaattgcttggagccaggagtttgagaccaacctgggcaatgtagcaagtccccatctttccaaaatattttaaaacatttgccaggcatggtgcttgcacctgtagttgtagttacttgggaggctgatgtgttaaggatcttctaagcaaaaagatggtgccaaattgctttaaatgagtgttaactgtgatttagatggttatttccaaatcctaatttgtaaataggccctaatctatgaaagagatgaaatgataagaatagcgtaagagtttttaaaaatataaaaattgccctttattttgggatgtctttcccatatttgtttttgctactggggggtcagcaggtgatgattaaaaatagataaagaaaatactagtaatacgagtactgcagatttattcttttatcgaaattcaggagtctgaaaatcactaatttacctaatatgattcaacaaatgaaattcttacattggttgaaacatacatacctcaagaaatgagaaaatagttatttggcacctttctccaataaagttttaaaaccaagcaattttttaagtacctttgtttttctttactaggtttgtaaatattatctctgtggtttttgtcctgcggaattgttcacaaatacacgttctgatcttggtaagtgaattttctgtgtaacttttatcaaatttatgatatttaaaatgttgaataggagtggtgaaaggaaaaaaactgattataattctgtgaagttttttcttaaagatttgctaataagtaatttcttacttggtttagatatttgaatgtattaataaatgtcagtctgattaaacatggtggcttaattaaacatacatgtctatttccactccctcccaaaactccacttaaatgaaaaaaattttaaaaagatgtatttggaagaggagataacattagagatgtcagcaaatttttggaagatgacaagtggatggaggagtagcagcaaacgcaacagagcagagcaacctgtaccctaaaagcctgcagaaggggatactaaacagaagcgagtgtttgatcagcagaaccctggacaggctcaggatttggaggcaccaggtaccacagaaggcagggttgagtcatggggctgaaaatgagagagattagtctgtagtctagttcagggtttctcaaccttgacattgttgacattttgagccagttttggagggggcttttcatgcattgtgggatgtttagcaacatctctggcctttacccactagataaccagtagcaccccctgttgtgacaccccaaaatgtcttcagacattgccagatgtcccccaggatgcaaaattgccactagtgtaggtggtcctgtgcatctgttgatcttactctcctccccatagaccccaggagaagagagggttattttctggagaaattggactagagagactagtttatctgaaccacaaaatagaaaaaaataattgactatttcctcaattctctcaaggatggtacataaccaggatcattctggatacataaaagaagtcaattcattatgtacaatctttgccttagagcattaggagcatattaaggcaggaccagtctagatcttgagatttcagacacagcaggggcagtagtaagttaaaaaaagaatgtaaaacagagtaaatgaatctatatttttattggtggggctctcctctgccctgttcctagaaggatacagccagatgtttttccccaggcagaagaaaagaggattcttctctagagaaagtgaacagttcctgagaagtgatctctgcaggtactgacccttggggaatctcttaaaagaaagtcttactgcctgattttcctatgataaagcccattcatgagctgacaaaccctgcctaatccctactaacttccagtcagattttggaagtgtctttttaaaaaattagttgcttgccaaggaccaccagccagacgttcgaagaaagccttcaacacaagagattaacaaaaccaacagagaaagaagaatttagtggaattggagataatggggaaagcagaagagagattcttcaaaatcttaagaaatttagtatcttcagagacatatgagaagacactatattcttcagcaataatacgatgccataaagagggaacttgtggaaaaagtgaaaaacattttctgaaaaacagctcttagaaattaaaactgaagaaatagaactaaaatcaccagaaagatttgaaaataaaattaaggaaatttactggaatattgggcagtacgacagaaggatttttaaaaaacttagtccaggaactgtactaccagcttaatagttgtggacagaataaaagcagagggaattgcttaagaaaaaaaatttgcagtactaaaggacattcatctttaggttgagcaggtcctacaagtgatcaggacagtgaatgaaaaagatccatacctaggcatacccctgtgaaattttagaacacgggggtggtgggggtgggtgtaggtcacagaattatgaatcagaatggcctaagactggtcagtaacaacgggggaagttgaagacattggagaaacatcctcagggtgctgagtgaaaatgtgtctgccggagggggaaaaagacattttcagatatacagggtctcaactgatttatctcccacgggccttttctcaggaaactccaccaaaacatgtccataaaccgagaaagaggaaagaaaaaacaagagatccagtaattctcatctactacagagcagaaaaggaattcatcaggacaataattctatagtgagcttagaaaataagtatcccagattgaagtaaggcagaaggcccatggaagaaaatgaaactgatgatgtgatatattttgagtcatatgtgaaattagtattgagatagtttctatagctgagtttgaagtgtttgagaagaatttgaaaatatagagaaaaaactaggctcacacctgtaatcccagcacttttggaggcaaaggagggcagatcactcgaggtgaggagttcaagaacagcttgcccaacagggtgaaatcctgtctctactaaaaatacaaaaaaattacgcaggcatggtggtgggtgcctgtaatcctagctccttggaaggttgaggcaggagaatcccttgaacctggtgggcagaagttgcggtgagccaaaattgcgccgctgcactccggcctgggcgacagagcaagactctatctcaaaaaaaacaaaacaacaacaacaacaacagaaaacatcagaagtgtctcataatgagcctttgtttggcctgacagtgaatagtacttgcataatataagcaccaagtgtttatttatccaaaaattttgatgtctaggattgataaatagcaaaataagcatagaattttaaaaggtggaggtaaattcgggaagaaatagagaagagttaagataattgctttttagaggtgggaagaagtaggggttaggtactagtctagtgctatttgactttatatacagatttgaaaataataaagtcggcaatggttcagttcagtggtctgtccccatcagttttctttagtggcaataaggaacagtttcctttcaccttccctccttttctccctccctcctttacttctcttttaaccatatatggttgctgtccattatattgactttgaagactgagcagatcaattttatatcctatttggttatgatgcttcatgatttagtaggatcagtttagatgtctacaaactactcagtgataaagtgaatcctttttctttttaaaaagaaaaataactctttttttttggcaagaaaaggttgctaataatcacagataatttatacaattatattttttcccccaggtccgtgtgaaaaaattcatgatgaaaatctacgaaaacagtaagttattttgcttgtcatttccacccccccagttattagttggtttaagtgggacaagggttgaggaataattgcaattaaatgtaaaatgagtgtctgagagaagtccagtcagtggctggggatagtaagaaagttctatagcttcagtaatgatactgatagctaccacatgagtgcaccctgtatgtcagactttttttttctgtagcccatttgctgttttttttaaatgagcctcactgtgtcgctcaggctggagtgcagtggcatgatctcagcttactgcaacctccgcctcccaggttcaagggattctcctgcctcaaactcccgagtagttgggattacaggtgcccaccaccatgcctgactaatattttgtatttttagtagagacagggtttcaccatgttggccaggctggtctcaaactgctgacctcaagtgatccacccacctcggcctcccaaagtgctgggattacaggcgtgagccaccatgcccagccccgattttatccatgagacttgtcctaggtccagggtcatagatccagtacagtggtaaagctagtggttaaacccctgtgtaaagctctatgatgaggggcaatcagaaagtcacttcaaatacacctggtttaccctgcagcctaaatggaatagtcgttgaggctagttaagatagaatatttgagttgtaatggctgaagatttggaaatgagtacttgtttattttcatgttaccaggtatgagaagagctctcgtttcatgaaagttggctatgagagagattttttgcgatacttacagagcttacttgcagaagtagaacgtaggatcagacgaggccatgctcgtttggcattatctcaaaaccagcagtcttctggggtaagtgaagtcaattcagtctttgtaaacggtccttgttttctggagattcagagacctccctaatatttttgaaacttgtcttctgttcattactttgttctttaaaatgatatgaaacttatagggcattcattttttttccagtctttattagcaaacataacactgattttgctaaccataagatttttctttgtttttatttttcttgaggccaagatttttcccttaaatagtagtaactgacaatatgtgattgaccaacagaagttgaagataattgaattactatcctttcaattaagcattttaattattaaatagaaatattatgtatggtatgtgcaagtttgcatgtttatctttgttttcaacttgttggtaatacgttttattgtcttcaataggccgctggcccaacaggcaaaaatgaagaaaaaattcaggttctaacagacaaaattgatgtacttctgcaacaggtgagaattgtgtgcattaatgtcaggaagtaatgtgaaacagacatgtaaccagcaaaaatacaaggatgggccaggcatggtaactcatgtgtataatcccagcactttgggaggccgaggcgggaggattgcttgagccggagaatttgagaccagtctgggcaacaaagtgagacccagtctttacaaaaattagccaggtgcaatggcgtgtacctgtggtcccagctacacacgaggctgagttaggagaattgcttaagcctacaagggcgaggctgtagttagacgtgtctgtgccactgcactccagcttgggcaacagagtgagacctcgtcttgtgtgtgtgtgtgtgtgtacatgtacatatatatgtatctgaaaggacagcaaatatgaaaagacgctcaacactattagtcgttagggaaatacagattaaaactgcaatcaaatacctatttgacacctatgagaatagctaaaattaaactgatcataccagctattggcaaggatgtgagccagctggaactggggtataatattgcacaaccactttggaaaaaatagtctcatttttttctttcatattcctgtagatgatattggagtctgttttgttgtcgttgttactgtttttttgacagtcttgctttgtcacccatgctggagtgcagtggtgcgatctcagctcactgcaacctctgcctcccaggttcaaatgattctcctgcctcagcctcccgagtagctgggattacaggtgtgcgccaccatccccggctgattgttgtatttttaatagagatggggtttcaccgtgctggccaagctggtctcaaattcctgacctcaagtaatccgcccaccttggcttcccaaagtgttgagattacaggtgtaagccactgtgcctggccctggagtctcttaaaaagttaaaaatgtaccatatgccattctactcccaaatatttatccaagagaaatgaaaacatatgtctacacaaagatttacactccagtgttcatgagtgctatattcataatggcacaaaaaaaataaaacccagactggaatcaattaaaatacccatcagcaggtgagtggataattaaatcatgatgtatctatatggtggaatgcctgtcagtaataaaagggaattagctacatgagacaatatgggtggatcttaaaataattaggctgagtgaaagaagccggacaaaaaaggaatatagactctatgactctatataaaattttagaaaatgcatattaacctacagtgacagaaagcagatctgtggttgcctggggattgtgtttaggattcaggctggaggaggtactgaaaagagtaggtggctcacacctgtaatcccagcactttgggaggattgcttgagcccagcagttcaaaaccagcctgggcaacatagtgagacgctgtctttccttttttttaaaaaaaaaaacagagtctcacgtcatcatccaggctggagtgcagtggcacgatcttggctcactgcagcctcctcctcctgggttcaagcaattcttctgcctcagtctccccagtagctgggattacaggtgcccaccaccatgcctggctaattttttttttttatatttttagtagagatggggtttcaccatgttggccaggctggtcttgaattcctgacctcaggtgatctgcccaccttggcctcccaaagtgcttggattacaggcatgagccatcgcgtctggccgaaagtgcatttttcttaacacatcagttatactttattgaagtataaaaaaaatccaggataaattaaacccaaagaggcttttgtaaatgaaaccaaacaaaaaagatggaaaacaaccactaatgaaccatggggaaaaaagacaatagttgggtttgaaagaaatcttaactgtttttttcccctactcttctaagattgaagaattagggtctgaaggaaaagtagaagaagcccaggggatgatgaaattagttgagcaattaaaagaagagagagaactgctaaggtccacaacgtcggtgagtaaaccttatttcacattatctcatctgtctgttaacagttagtaggaactcatttttatttgagaacctttgaaaactgatgttccaaacttagagtcagcacaatttgtagcccacaaggtctgtggcatctactaagctctgcctttgtgcagtatgcaagcaactttatatagtacaagaaacaaatgggtgtggttgtatcccaataaaatgttagcaaaaggcctctctggcttgccaatcactgccttaaaccataaattttcatatgagcctggttttattttcatttttgttgtaataaattactcagtacatacttacatctttgttaaaaattaatacacccttaaatatctaattcttttaattggagaatagaatatacttgtttcagatactattgattgcagaatgtaattggtcattggttcctccatattgaataggatatgttcagattatagtcaatgtgcttagttccttaattagttttgtatatggacattattccttgaacctaagcaaggaatgtattcatactaaaataggtggctttctgaaaggtgatttaaattttgtaaggtaatgtgggtgttgaacattgaacagtgggtctcaacatttcttctggatgattcagtaagttagttgctgttaccttaaacatccctctctaaaagttgaccacttgtagtccaatattactgatttggggaaatggaaaagagcaattcacacacattagaaatcttttctaaatgttgagtactttcctgggatttgtttctcttcctcagatgttcttaaaataactgatttatcattttagacaattgaaagctttgctgcacaagaaaaacaaatggaagtttgtgaagtatgtggagcctttttaatagtaggagatgcccagtcccgggtagatgaccatttgatgggaaaacaacacatgggctatgccaaaattaaagctactgtagaagaattaaaagtaagtttttttgtttgttttgaggcagattcttgctctgtcacctagagtgcagtgacgcgatctcagctcactgccacctccacctcccaggtttaagcaattctcatgcctcagcctcctgagtagctgggagtacaggcatgtgccaccaggcctggctaatttttgtttgtttgtttgtttgtttatttttgagacagtctcgctttgttacccaggctgaagtacagtggcgtgatctcggctcaccgcaacctccacctctggggttcaagcaattctcatgcctcagcttcctgagtagctgggattacaggcacacactaccacgcccggctgatttttgtattttttttaatagagacggggttttttcctgttggccaggctggtcttgaactcctgcctcaggtgatccgtcctcctcagcctcccaaagtgctgagccactgcgctcggccagcgtaaatttcttctaaagatacattttagctattaaaaaaatctattttagctatagctacagcttttagctatcagtagctatagataaaaataactatattctaatatggcttaaatggagatatgaccctctcattgatattttcctatgtgtaattatttttgaagcattgtgagttctgtgaaattttgctatttattgaactatgaaagcacttgattttcttaactcttgagtgccagaaatttgggaagaatattcctgaggattagacaaataatgataccttgtgtatatacatggtgttggaatgtctacatttcccttaagggcatcaattccataagttggtctacagataacttcacattagttgaccattgtttaacaatgctttaaagttacatttgcataagaatccaacttgatttttctaggaaaagttaaggaaaagaaccgaagaacctgatcgtgatgagcgtctaaaaaaggagaagcaagaaagagaagaaagagaaaaagaacgggagagagaaagggaagaaagagaaaggaaaagacgaagggaagaggaagaaagagaaaaagaaagggctcgtgacagagaaagaagaaagagaagtcgttcacgaagtagacactcaagccgaacatcagacagaagatgcagcaggtctcgggaccacaaaaggtcacgaagtagagaaagaaggcggagcaggtatatataaaacaccctaagactgtccagctcataatgggtgtgcaataacaataataactactagtattattccttggaatggtacttgggaagctcttaagcatctttaagtgataggatgggttgcgagagcggaatcagtgaataaaatagttccatcttcggggcaacttctgtgccatttcccacctgtctaggaaatttcacccaacctttttacaaagttagagtacctgatggtctcttaagtgcttgtctcactgattccgagaaataaaatatgaaatcagccatactgttttaattataattacaaattgaagaagagtcttaaagagcacaacgataaccatcttagcactattggagatgaatttagaaagattttcaataatttttagttcttaagatttctaatgtaaatatgttttagagggtaagttttgcctagtcttgttaattaatagcatctactccaaggcctttacttattgtaatactggctgaagttgccttttggttttaaattattaagaagtagagatcgacgaagaagcagaagccatgatcgatcagaaagaaaacacagatctcgaagtcgggatcgaagaagatcaaaaagccgggatcgaaagtcatataagcacaggagcaaaagtcgggacagagaacaagatagaaaatccaaggagaaaggttagtttatatgagaattcagttcattaagaaacttttcacaccctaatcgccccactcacttttctccagacacaggcaaagatccatttcatacatactccttttcactttgaggaatgccattcagtaggagacaggcattctttccccctctcctacttagatttgtgaaaatgacagtttatctggtgttttcttagatgttaaaaacatctttcagttgataaacctgaaggtttttaatgtagcttcttttaagtgttatattacctttcggggttattaggtgtaggatttattatattaccttggttattggctccttttttttttacacactgcagtgtttcataatacgtcttataaagtgagtgtacattgttgcattaatcttcatttgtagcattcatttaagttagtaattaacatctaagtacctagaagttgaattgcttacatgtgtcttacccacgttttcaatgggatcaacatgctctttcccctttactttttcttttttctttttctttttttttttttttggtgtggcatcccagtagctgatttactgtgctgttggcactattaatggactttttaatttgtgtggcatgttttcacaagaatattctcatctaacttagcctttattggaagataattctgttaaccaccagggtctcctttctgagtttcatgttcttctattttgtattttttatataaaagatataaaatatcttttattttgtattgaatgagctgttgtgctttgcatggttttaggaatgagagaaggggcctatttctgattttctcagctctccttgtttcatttcattctacctgtctccatgtttaatcaccagcataatatatgtgctactattaaggtttattatactagtcttttgtgtgttgtttgtttattatatcctttaatagaactgtcctggttttttgttttcgtttttcctctagactcagctagaactagcagcacaaaccatggacatattttttggtctctgcttttattttcttaaaataagcacacactctttttctgaaatatttaacatctattggcttttactgtaatgtgagaaagtgttgaaaacttttgtcttcctgccagatgtgctagtgtttgccattcaagttgagaacttgcttctgattcaaaaggcagttgctacaaagggttaactgatttaacattagatttaagaatgttttacctaatctttttgcaagactttctgtgtaatgtctttttgggttgagaggtcaactcttaagagccaggtatgactgtcaggtcaaattaataatatttgttttgagaaagtttttagttttacatttcctattgttagctttagttgctctattctgtgttatcatttgtgccacttaaaattgttgggttggttcttagggataaaagctagctagccttcataactacttgaagtcaaagttgagtagtaaatgacactggcctgactaaaaacaggcatatttgtgtaatttctggatagagcaaaaagatgtccagagttgcttacctttaatcctaaaattgtaatgatgatgacatgaaatttagtgaaacttttttttttttccagacagggtctcagtgtcacccaggctgagtgcagtggcacgatcacagctcactgcagcctctacctccccggcccaggtgatcctcccacctcagcctcctgggtggctgggactgtaggtgcatactaccatgcttggctaattttttttttttttttgggggggtagagatggggttttgccatgttgtccagtgtgatctcgatctcctgggttcaagcaatcctcctgcctcagtctcctaaagtgctggggttataggtgtaagccaccatgcctggcccctagtaaaacttttcgttaagcggaataagctgagttacgtttagattagcaacagacagggattttccatgtgagacttggtgcaaagagagaagttactaagaaaactgtatcaggcttgtctcccatgattgggtatgctatgatagagttaaacattggaatctcttttagaagtgatataatttattggcattttgaaaatgctatgtaaaaataaattaattaaaatcagtgtgcagatgagtgaatttaaaaaatgtaaaaaaaaaaatacagaaaagaaactaccatgtagccatctaggcactcttataaatgactgaagatctggactttgggaccaggtgtgagccacagtgggcatttattaatggcaaatgagaaaaagcaagtttattactccaggtgctatgatagaagcagtttatcttactccacaaatgaaaagtggtttctcacacaaagctgtcagcaaccagtgtaaggtgctctctttgtcaagagagtttccttttttcatccatagccctaaaatccaccacaaattgtggatgtccttaggactattaagatctaccatatttacatagggcagaagataagattattggactgactactagtcctctacgggacaacaagacgactcttcctcattgaagctacctgtgcaccggagaagcccataaggcacaaagggaggactttcccacaaggtcagttagagcccactgtcctggcacagttctcacaagtggacagacagacatgaagcaagtcttgcgcttaactacttggacattgctttgtgtattatgcaagtgttacggactaaatatgctcttttacataagatcttcagttctctgagtgggtgcccctcccataccatgttttgtttttcattaccatctctttcctagatatttggtgttacgtcttcataactgtgcagaaactatgtagagggttctgtttctcttaaaatgtctttttgtctaattaactactctgccagaccagctattcttagtaaggggaaaagtaatttttccagaaagtttctagttggctttaacattttctgtagaaattttttgttgggggaatacttggaactgaaaaggctagactatgcttgctctggtgtactacttttacctctagtctgaggtcttacccatccaaagaatagtagaggaaaaagttgtttacctttttcattcttcatttgcagctgagttgaattttaatttctctttttggaaaaacaactctcagatggcatatatattacttttcttagcaaagcacaaaagttcagttgcttagattgggatttaagatccattttctttgattaggcttatccttcttggatattcaaatatatataaaaataatgttttgcattgaaaaatatgtagttgtagtttttaaaacatgcctgttataaacattcaactttttttcaccttttggggtctccatttttacccttctaacttaataattgaacctcatgtgaacatagttttgtatgctgtcttttatacctttcccagtgctttttgatgttttttacccacaatgaaatttacttaaatattatattctgcaatgtgcttaatagcttctcaccaattgagagaatttacccactattttaccttttgcttccttgaattccccttcctgccttctctctcatatattacaaattttatccctttggtaaattcaccaaaccgttgcttgcagtctgtgggaaatgattgtctctcatctctcagttgtttcactttttttcaaaatcatgtctttattgtattttactttaaaatccatggtcaatgtcttcttttatggcagaaaagaggggatctgatgataaaaaaagtagtgtgaagtccggtagtcgagaaaagcagagtgaagacacaaacactgaatcgaaggaaagtgatactaagaatgaggtcaatgggaccagtgaagacattaaatctgaaggtgacactcagtccaattaaaactgatctgataagacctcagatcagacagaggtaagtgtattgtttctcactttgattagggctttttgttactgtttgacagtgcagcgtaagtatgcacagatgaagatggaactaagccgagtaagaagacatacaaaagcctcttctgaaggaaaagacagtgtagtcctgcaaaacattttgaggtacattgttttgtctcagctattttgtagcagactcgtgcccccattagtgtgcctctttggaaattatcgcccacatttgtaatatagtcgccattgaaaagttaattatcctttttttagggattttgatgtcatttcttttttttttttaataaaaaggttgaactgtttttttttttctttttggtattaagtccatcttgtgttggtacattggcagagacatatgctttaaaaacttaaatatttcggaggcacatgttggactactttgttttaattaaactgctagtatttctttgtcaaggatgtttctagttttttgctttattgccttgcattctaatgcagtttgttctgtaactcgagagccagtagcattggattgatggaagtgtagggtttatgaattattgcagctgactaccatacctcacacagcgttggtgttgtgagcggcccatgaaaagccaaattaaaaatcaaggattcagtcaaactaagcaggtactcatgccaggtactcctttctctacccacatccatgtttgaatgctattgcctgtgatctttacgcttaactgttgtgtatcttttttgttctttacaagaagtgcagaggggttttttgtgtattgcgtgaaaacttataaaacaaatgttaacagaatggaattttttttcaactgtatgtagggctgcagtggtggccagaattagatatctttaaagaattttaaatacaataaacacttcatattattcgccttgttacactcaatgcaattctcaagtctataagaggtatgtgcttaatatttcctactgtgtaggagaatttgcagtcagccataggtatgtaggaatagtcactcactggctgatacatttaaagcagcagtgtgaatagcaaggacagacaccttcaatttgtgaaatcaaagaactgatgcactatatagaacgaatttgggtttttaaagaaatattaaaagttaggtactgtaagtgttcttaaaacctgtaaacttcattctgtgggctagtggtgtgggacaaaatattcctaatgaaaggaagtaccaattagttgatttgttggtggcattccccttttgggaaagcaatgtaaggttatgtctgtgtatgtcattcacacttaggcaagcatacacaggcacatggctttaagaaccacactgatgccttgataattaaaaagaatacaagcattccatgtacacatgttaattagcagttagtgactgggccaacactttctcataaaaattggccttttacatgttgtctaattatcatttttccccaaattttgcgttgtaggactactgttcgaagatttttggaagaatactgagaacggcataaagtgaagatcgacatttaaaaaatgaggtgaaagaaagctatagtggcatagaaaaagtataaagctcagttagtttttttattattattattattaaaagttaattcaggactgatgtgacctaccagatttcagaacatgtgttaatagtatatatgccactgaaaacttaggtcctgtatcatacttttttctttaagactttttaagaaatattacttaaacatgtggcttgctcagtgtttaattgcaagttttcaatcttggactttgaaaacaggattaaacgttagtattcgtgtgaatcagactaagtgggatttcatttttacaactctgctctacttagcctttggatttagaagtaaaaataaagtatctctgactttctgttacaaagttgattgtctctgtcattgaaaagttttagtattaatctttttctaataaagttattgactctgaactagtcccctgttttaaatacaagagttacactattactagaggtgttggtgtacagttttatctgatttgttctgtttaagactaatttttatagactttctaatgttttaaataatggtgcttcaattttaggtggttatgaataaatttgaattttgcttttaatagcaaagatgtgcagtgaactagaatatatttttacatccctgagagattcatttagtagaaaattccaagtatcctgacaagcactctttagctggctagctatgggatgatgtagaaaagcattcaagagctagtttttgttaagtcctgtatcaagattaacccagctgtgtcagtttataaatgtatttgtgtatagggtgtgtagtatatatggcaagggttttttccccccacttaagtgattatttttgtgtcacatctaggaaaaccggcagcatgtttctatctatagccagcttcttcgactgtataaaagtattctctccagctacgtatatacacacatacatatatatcatagcaattccttgtggtttataacttgcaaatactgctatcagtttataggtaaagaaacagtgtgttaaatgacttatccagggagggtcctgtggcttcatgtttatggagttgctaggtctctgcctcatggtccagtgcctgttaagccactgtgttcattctaataggcataatgaattgttaaagaatttactaaaatctcttccaccaaactttgaaaaataatgaagccgcccccactttagaggctctgtatgaaaaaatgctgtggagacagagccctcctggctccctagctgatcctggagatgcagcaatagatgaatgggttatctctgaatttgtaagagataattcacatgaggattaagataaaatgggaagtaaaatctaacaaacacaaagatagctcccaggcactgctttgtgtagtttgacagcattgtggttgtagcagcaaaggacttaaagtgatagtttttaaaccatattctgtccctaagtaataaaaaatctaggaagttactaaaataccagatttgttctgctctgcctcatctagaatcaacgtctaactaacttaaatgaagtataataaatgagttcatatgaaaaggcttcctctatggacacttagatatattgtaactattgaagttacctgggatgtgggggtggtgggaggaggacctgcctccccaggacatctatgactaaggcctggctttagttatggagagagacgtagaagttgaattttacacccaaaattgatgtgactgaagaggaactgattgttgctaaccagctcacaagaatccagtattgagaccagttcactagaagaaacaaacatttctgccatgcagaccaaaaagttattagttggtgaatatgtattttctctttggaaggtctttaaggggagcaaaccagttttaatcaatcagattgcttggtaagtttggaatctgcaatcagttggtcttaaaaaaaaaaaaactttattttggaaatttaaagacatacacaaaagaggaacaatataattaacctctgttaactcatcaccaacaagactcatgaccacttttatacttcatgagtgattgtatttgtatccactgttttctattattttcgagcaagtctcagacacaccatttaatctgtaaataattcagcatgtatctctaaaagacaaagacctcttaaataacagttcattagtataaaacaaattgggtaaacttttgttggtcatcaaactatattagcactggtccaatagtttaattttcattgagcctttcaagaggaccgaccagtctgctgctcaagacatcctctcctctggaatgtagagataatacatatcatgctcctttttgttaaaacgtttttttttccccttcaaacacagtccattcatttttcagtttgggttgaaacatccttttcttgatcttgagcttataataacctagtcatattgctcagctcagatatttttactccctctccttaggcattctggttccttaaatatagttagtgtcacagaggataaataaccaaccttatttctaaggtctgagaacacttggaccacatattggttgagctcagccaccttctgattaaagttttcagacttgtaagaactgaaaatttttatggtggaagttctctgagccctcatccattctgtttttaaaaatgcattgcagatgggctatgtgaatatgtttttaaacatctgatatgtgcatgaaacaaaaaacacttgaagttattatgtatacaattctgtgggatgggacttcatgcaggattggttttcaagtttgatttcctgagggattttttagttgtttgtgaaagaaccccaggtctacttttgaaattttgtattataattgtaatgttgcccatggttaaaaaaaaaaagtgttcagtgatctatgtctcctactactcctatttctctgtttttcctctgcaggagcttgctgctgttaacagttattcttccaagttgttttctttgtggggagatgggaggtgggaggaaatataaacatatatgtatagatctttcaaaatatatgacggtatacccgtatgttctgagtcttgctgtttttacctggtaatatttagaaacatttattttgagataaaggagagcacttttaagttgaacctgtagttttaaaaagtacatttcaagtaagccaaagcagagaagtaaatgtatttttcattgttgtatcagaattttgaatttactattttaaaaattcaagagttttgtagctgatctatttcttcccctcagccatcccaaataggtcatttgtcaacagatttaagaatgtttagaaacaacaactttgggaaacgggaaacaatttggtataagtgggtgtgccataacctctctcgtagccattcattcccggatacataccctagagaaactcttacacatgcgtaccaggggatggatttaagcatttgtgtgtaataggaagaaaagaagaaaaaacccgggaagatcccaagtgtccaccaacagtgtgttggataaatactgtggtatattccaacagtggaattccacagaagtgaaactgaactgcagctgtgtatgtgaacatggacaaaactcaacaatagaaggatcaaaaaaagcaagtcacagaagaatacatcactatggttccatttcaatgaaagtcaaaaacaggctgtcaaatacatgataaaaggaaacgattaagacaaaatttaatgttagccgttttgatggagggagaggtgatcatgagggcacaggggtcttcagaagaactggtgagggtctgtttctgaagcctgtgggcatttccttttttaatctgtatgtttatgtgcttttgtatgtatgatatttcttaataaaatttaaaaagaagaatgggaaaaaagtcttggtgtaggtagttactaatatataagctgtagtgtatttcgtaaaattaaccatcagtcagtgacaaatttaaagatgctgtttcttgagtgcccaatttaaggttttattttgtttgagacagggtctctgtcttgtcacccaggctggagtgcagtggcacgagctcagctcactgcatctttcgcctcctgggttcaagccattctcgtgcctcagcctcccaagtagctgggattacagcttcgcaccaccacacctggctcatttttttgtatttttagtagagtgtttcaccatgttgtccaggctggtctcaaaactcctgacctcaaatgatcaggcccaccctggcctcccaaagtgctgggattacaggtatgagccaccgcgcccagtcttcaaattgaggtcttaattgtaactcttaaaaagctagaaacggcgacaagagcaagactccgtctcaaaaaaaaaaaaaaaaaaaaaaaaaaagaaacctaaatgtatgttttctgtgtgataccttattttcatcttaacatagtttctacttgtctgccagccagggagctgatggttttgttttcctgtctaaacagcttccaaagaagcttttctcaggcttatgccattctgggaaagaaaactgctttactgtgctgtactccttcccctggcccaagttaggttgttacctcagagaggctgctgctttggccttgttctaattttagtaggggtactgtgaacacaaaaatgtttactctttaaaaagaggaaagtgactgaaatttgaattggcagattcataaggttcatataactaaggccctacgtcagtttacagcagccctgttacccctcaactatgctccaggtgagacttggatcccctcagtatgagcatagggcttggctgtgagttcatccaacacatccccgagtgctcctatgtgctgtggagtgactgatacctttggatacaccaagaacaaaataggtgcagctccaggtccctccgctatggaatctgtcctcactgcagcagtggcaccctcagggctgtgccttgtacacaggacttctgaaaggggagtggaaaggggtggtgctgttgagttactaatcaccctattagttgaaagtgcagagttaatgaacaactaagaattctaggtcatttcatattttattttaacctaaatagttctgggacttcttaggatggcattttggtacgtgattaatttcacttaaggccattttagaatcagtggaattggccgggcgcggtggctcacacttgtaatcccagcactttgggaggccaaggcagtcggatcatgaggtcaggagttcaagacctgcctggccaacatagtgaaaccctgtctctactaaaaaaaaaaaaaaaattagctgggtgtggtggtgggcactgtagtcccagctacttgggaggctgaggcaggagaattacttgaacctgggaggcggaggttgcagtgagctgagatcacaccactgcactccagcctgggtgacacagcgagactgtctcaaaaaaaataaaaaataggctgggcctggtggctcacccctgtaatccccagcactttgggaggctgaggtgggtggatcacgaggtcaggagttcaagaccagcctggccaacatagtgaaaacccatctctactaaaaatacaaaaaaaattagcgggcatggtggtgggcactgtagtcccagctacttaggagacaggcaggagaattgcttgaacccgggaggcagaggttgcagtgagccaagatcgtgccactgcactccagcctgggcaacacagtaagactctgtctcaaaataaataaataaaatgagttggaattgcaccttactcagggattagttttttataatcgatgtgtgaggtgaaaactaatcaaattactcttgaagctcttcaaattttgttttactgataatctgcagccttaagacttatttgtgttatagaaaatgagttttggctgggcgcagtggctcacacctgtaatttcaacacttcgggagaccaaagcgggcacatcacatgaagccaggagttcgacaccagcctggccaacatggcaaaactttgtcaaaactatttttaaaaattagctgggcatggtgatgcatgcctgtaatcccagccacttgggtggctgaggcatgagaatcacttgaacctacgagacaggttgcacagtgagccgagatcatgcactcaagcctgggtaacagtgatatgcacccccccaaagtttttctttttttctttttttttttttttttttttagagataaggtcttgctatgttgctcaagctaaacttgaactcctgggattacaggcgtgagccactatgcctggcctcaaaattaaaaaaaaataagcaatttagatgctgacctgaagtgcttctgtcaccttgttacaggaggccgcaaatgctaactaagcaagttgcagatggtcccacatgacgtttctgaatgaaacaggacacttcttactattggaaccatttttctctgttttgaacagttggataagggaagtcttgacgtgctgcctatgtgtccgctgcccttcatcaaagttgagctactgagaaattggagttgaaggaacagtggctaatggcatgtgctgggatgcaagtaagacattatgcttggccataaggagttctggtattttatgtatacctctcccacaagctttagagatgacttcgtggtctaggaggaacaggtgtgtaaagaagtgacagtgtggtgtgtgtgaataaaagtgggtagatagggtcaagccattgcatgagcccgtacaaggtgcaagcagagttattaactagaatttggcaagggagctgacccggaaggatcctagggagtgtgttagggaggaatgtagcatgggatgtgatgacagctcactttagatgttagtgagggcaccagctggtttttcagcttatttcacagaccagtggcatgggctgtgcctcgcctgttctgtaagtggtatgttaaaaatagcctcaaaggtattaatcgttattggctgggcatggtggccacctctgtaatcctagcactttgggaggccgaggtgggaggatcacttgagcccaggagttccagaccagcctggccaacatagtgagacctcgtctttttttttttttttttaaacggagacttgctctgtctcccaggctggagtgcagtggcgcaatctgggctcattgcaacctctacctcccaggttcaagcgattctcctgcctcagcctcctgagtagctgggattacaggtgtgagccactgcgcccggccaagacctcgtcttaaaaaataaaatttaaaaaatacttggacagatgcggtgcctcacacctgtaatcccagcactttgggaggccgaggcgggcggatcacttgaggtcaggagtttgagaccaacctgtccaacatggcgaaaccccatctctactaaaattaccaaaattagccaggcattttggagcatgcctgtaatcccagccacttgagaggctgaggcaggagaatcgcttgaacccgggtggcggaggttgcagtaagccgagatcgcgccactgcactccagcctgggtcacagagtaagactccctctcaaaaaagaaaaaaaaaaaaaggagttatttactcaactcagatatcatgccattttgtagatgagtttaaaaaggtgtaaacaggaagtgatagtatgggacacgtttaaaaatgaggacaattggccgggcacagtggcttacgcctgtaatcccagcactttgggaggccaagagatcacttggggtcagttcgaggccatcctggccaacatggtgaaaccccatctccactaaaaatacaaaaattagccaggtgtggtggcacatgcctatagtcccagcgactcaggaggctgaggcaggagaatcccttgaacccaggaggcagaggttgcagtgaaccgagatcgcgccactgcactccagcctggacgacagagcaagaatcccgtctcagaaaaagaaaaaagggttgggggacctgagcacagtggctcacacctgtaatcccagtactttgggaggctgaggcgggtggatcaccttaggtcaggagttcaagaccagcctgggcaacatggtgaaaccccatctctactaaaaatacaaaaattagctgggcgtggtggtgtgtgcctgtaattccagctacttgggaggctgaggcatgagaatcgcttgaacttggcagtgagctgagatcgtgccattgcactccagcataggcaacagagtgaaactctgtctcaaaaaaaaaaaaaaaaaaaaaaaaggcggagtgggggcggacactgatagaacttgtgttgccaagtgggtcctggctttcctagcaccatcagctcaccctgcccatgtgggttgacctgaagagactctggccatttgtcctgactgaatcttataaagcatacatcaggattagggcacaactctacaaaataaactgcccttggtgtaagtatcataccttgtgatgttttttatagctatttgtcaaaaccctaaacttaactcttctcccagcccagagaaattggagatgacgaaacataataatttctcacagttcaaacatgaagttagccaaactggtatatgcatccagacttcattatttgtgaaataatgatttcagttttttaattcctgggattgattatttatttatttatttattttgagagacagagtcttgctctgtcgccaggctggagtgcagtggcgcaatctcagctcactgcaacctctgcctcctgggttcaggtgattctcctgcctcagcttcccatgtagctgggactactacaggtgtgcgccaccacacctagctaatttttgtattttttttagtagagactgggtttcactatatgttggccaggctggtctagaactcctgacctcaggtgatctgcccaccttggcttcctaaagtgctgggattacagggggtgagccaccatgcgcggccattcctgggagtatttaataagtcatttttgcagctttgctatcatagcagggcctttctgtcagagatggcacatattctgtcaatctggagcttccatttttcattaaaatgagttccacttcctgaaagtcccgcagtcttcgaatgtctttgtccttaatgtagaaaagaaattatattatgcttaataaatttgaatgtaatagaaaaccttaatattaatattgttcagcatcttgggttctgaacccataaggtattgttttttttgagacagagtcttgcttttgtcgcccaggctggagggcaatgatgcgatcttggctcactgcaacctccgcctcccaggttcaagtgattctcctgcctcacttggctcactgcaacctcagcctcctgagtagctgggattcagacatgcgccatcatgcccggctaatttttgtattttttatagagacagttttcaccatgttggccaggctggtcttgaactcctgacttcaggtgatctgcccacctgggcctcccaaaatgctgggattacaggtgtgagccactgcgcccggtccccataagatagttctgtatttttttttttgagacagggtctcgctctgtcacctaacctggagtgcagtggcacagtcacagctcactgcagcttcaacctcctaggctcaagcaatccttccacttccactgcagcctcccaagtctactacacccagctaatttttgtattttcctgtagagacagggtttcaccatgttgcccaggctggtctcaaattcctgagctcaagcaatccgcccacctcggcctcccaaagtgctgggattacaagcatgagacaccacacccagcagatttttgttgttaaggtatctggaaagcatgatcatcccttgacatgttagtttacaaagaatatacactataagccaagacaccagtaaggattgccaaaggaacagcagctcaccacctgttatcccagcacttaggaggatgaggccagggggttgagaacagcctgggcaatatagccagacccatttcaaaaaaaagaaattaatggagtgtggtggtgtgtccctgtagtcccaactactctggaggctaagatgggaggatcacttgagctgaggatttcgaggctgcagtgagctatgatcacgccattgcattctattgtgggtgacagagaccctgtctcaaaaaaacaaaaaacaaaaaaattgccaaaggaattttgaaagctttaaagaaaaatttccaaagaaataagatttcctttccaaaattaaaaattaagatctgtattttaaatctgggaaatatataaaaatgcaaaacaatttttgtttgctaatatttcaaatacttagcaaacccaccctttgctaagcaaacaaggatgggtttgtgtttttttttttcctgaggactatgccattttatgttaaccagtcaattttgcagagattggtggggccaaaagcactgaactaaagccttaaattggggagtcacttgtcattcagaggtttgtttttttttgagacagggtctagctctgtcgccaggctggagtgcagtggtgctatctcagctcactgcaacctcctcctcctgggttcaagcaattctcctgcctcagcctcctgagtagctgggattacaggcacgcgctgccatgcccagctaatttttgtatttttagtagagacgggttttcaccgtgttggccaggatagtctcgatctcttgaccttgtgatctgcccacctcggcctcccaaagtgctgggattgtactggtgtgagccaccgtgatcggaccatttagaggtttttaaaaggtttatggattagatgtgcaaatcttaaaagcgccagattgaaaatgacctagctaccatgtttggccgttttgcagccaggatttctggtgtcatgaaatgcagaagtgtaaacgattggctccagagaacatgatgtcacccactgtgattctgcatttagaaactcttaacccttacctttctgagcagtgtgtttggtagctttctgatcttctccactcgttctggtttaatccccagttcacagcaactcacgtttagtaggttttggtaactcagttcttgtctcttcagttcaatttcaatgaagtcattttctttggggttctgaattctgactttaaacacaagctctaaatcacccataaattcaaatacagtttgtaaaggaaacaaaatacctgtcagagattttcatatctattattacagcataaataatcctaaaaactgaatgttaagtagacatggagctttcatgggcacatacacactttgcattagctgagggttcttttcttggagtgttgggcaagctctgggatgtatgcccccattatatccactgaagacagaaagcttgcagctttaagccagccaaggatttaaaatatgcaatggatatttaaacacatcacccttgggcaatacatagcaggtgctcataccttgttgcttatctggaaagcttcagggaaatgtatagccctgggggccctggtgtccttaaagaagctattgtgcagaggagcaaatcgctcttgagattcctacccaccacccccactcctccagaaataggataattctaccatctttcaggacagtggcattgtattccaacttaactgtcctgagaagatacagtatgaactaaaagtccaaatggaaagcagatggtcagtttggctttgcaacctggtcacataggggctgagtcttcacctagacaggtgtcactgggtttcttgttatcacttgggtccgttgttggcaagtgtggatttgtgccttcttgtttatattcacctgggaatcaggaaagagttgagaaggagcagtacctgaccagttggctgtctgccagacaaaggacaaggatgccccacttccacttcctgccctgcagcttatcctccccttctcaagggaaaaggcaagtcaggaaaagggcagtaatgactttcagtcttgaagagtaattttctttaatcaccacccaaatcatgaaaaggagctgagacagtatttttaaatggtgcgtaatctggggaagaaatatttataatctctgtgcttagctcaagtttttacttaaatatttttggcacagagtgctttatgtcttcagttctctagcagagatacagttaggagggtgtctttataaggagaaattttctcacccagagggaagggaaaggagtgaatatttagagtgctttgcatatgccaggccttttgtgtatttctttctttcttacaatatccactgaacatgttgaaagcctgctttgcaccaggcactgggctaagccctggggaaatcatgttcaaaaatcccaaagatgtctctgtgctcctggagtttgcaggccagcagaagagacagatattaataaatgggaaatcacagttgtcggggcatgatgaatgtgaaatacacagtactttgaaagcatgttaggggtcaagggaggcctccatgaaggttgattatttgagctgacatctgaaggatgaataggcttcactagatccagagggcagaggaggtgaagagcttttcacagggccctgtggagagttcagcatggctgcagggcagagagcatggggggactgagtgtcagacaggctggcaggggccagttagtccaattatgtagcttcttgtcacatgagataagatacacgataaggtaaaatataccctggattttggaggcaataaaaaattttcatacttatatgttgacataatgatttgcatatagcgggcaaagtatattattaaaattagtttcacctgtttttactttttaaaacatggctactagcaattttaaattacatatgtggcttgcattacatttctattgggcagcattagtctagatgaaaggttttggtctttgtcctaaaacaccaccaagccattctggtttttagcagagagctgtcataatcagacttgcattctggaaaagagaaaagcctcactgtccccaaaagaatcctgtggggtatgcacattattattttcattttcagacaggaaaattgaggctgaaaggggaagtagtttgttcaggttggtaaatggccagatatggatgtgaccagggccaactacataatttgcaaagccgagtgcaaaaggaaaatgaagaggaagccaatttccccttctcacagccgctgctctaacccagggcaaatgggtgacgcccagggtattgcgacctccccacttgaacgcaccaactagctggatgggggtgggtgagagtgtccagggctgcctgccactcctcaacttctgatccttgttttgcctgggcaaaggtgacagcggaatgagggactctggcagagggttacagcagtggtggggctggtctgggtgtggagaccatatgtatgagctgaggctccaactcccaaccctggcacatgctccattgtcccatcggacaccacttacaaaacaagttcagggctaaaattatgacacatttcaagtcaacaatcacagaatgttgaaccccaagcccagggcctttctgaatgcaaggccctgggcagctgcactgatcacagacttatgaagtcagccctgtttgtgccaccctgccagatgcctccaaggagatgagacgctcctgcccaactcagccccttcccaggacaggaataatgtcccctcccctagtgagcggggatctgcagtcttctctttgcctttcaattctgggccctggaggtggctcagggctgtggctccttctcaggcagcccctgtagcagctgggccccagcccacctgccagtacctgacctgatatcgatacctgatagagataccagaacctgacctgaaacgaggccttcctgcctcactgctaactcacccaacacacagcccgagaactttccctgccctgtccactacgtttgaaagcattttattctgtggtcaatgtgtcagctctgtgaacggccagagtctcatagaggtcacaaagcatgccctttgcactcaggcagatttgggtctgaattcctctgccacttagtagctttgacaccttgggcaagttacataacctctctgatctgaaaatgaggttaacaatcctacctcaccagattgtaagaagtcaatgagaaagtacacagaaggtacaacttcctagcagttgtgagcaccagtaattgctggctgctattattatttattatagctatagacacttgcttccttctgaaaggacctttggtctagttgctctgctcttcactaccccactggcagagtggcggaggccacagggcactgctggccacagcatcacctgtgtcccagccttccccagccccctgtcccatcctccttgaggaccatgttgggaacaggactcccagactcacctgctggcttctccccgatgtcctgttccggttcagccatgagtcacctctagtccgtcagatgtgcagcccctctcgcatttatgcacaagctcccaaccaaataaaaagcactttctacagcctcagcacatctgtctgcaaggtaacaacagtgtgttcttgccagcccagtgagatagagcagggtcatttttattttatagatagggaaaaggaggctgcagcgtgtggcatgatttgcacagggtgaggccagtgaaggaaggtactgaagtaaggctccagactctcttctcaggctgtccccactggaagacggtgcaggccggtagtactcacccgagggaatggtgcccttcggaggggaggccagagaggcacagcaggcacccagccagacccgagaagggggccaggccctctttcttggaaaaggttggtagcttctacaccaggggtaagaaaaaccaaacactttgtttctcggtttgaatggactcctcctccccatttcactgtctttactcccagccccttcctcagcagctgtgcatgacaagaaagaagcagaaagacccctccatacctgggaaaatgaccttggtgatgatcctggatcccctgattctagacatcaaaatggaggaggcagaggctggagcaggaggttcagtgaagaatgggtggggagggtcaaagtccccagtgaggctgctgcctcaaaggcaggctgaagacaggaggaggtgcacagataggaacccagatgttcgggtaacgctcacatttcatttaaccctccaatgacaaaagacgggcaaacagacggggcatcagggtgggcctcagcatcaaaaaactggagggagctggctgggtgcggtggctcacgcctgtaatcctagcactttgggaggctgaggcgggtggattgccggagctcaggagttcgagaccagcctgggcaactcgatgaaacccccatctctactaaaatacaaaaaattagctgggtgtggtgtcgtgcgcctataatcccagctactcaggaggctgagacaggagaatcgcttgaacctggcaggcagatgttgcagtgagccgagatcacaccattgcactccagtcttggtgacagagcaagactccatctcaaaaaataaataaataaataaataaataaacactaaaaaaaaaccataaaccaaacaacaacaacaaaaaaccaaaaaaaaaaaaaaaaagctggagggagctatggagatcgcagccccccggctctcaaacatggtgtgcattgaagtcacctgggaagctttaaaaaccgtggatgcccaggtcccaccctataaagtctgatttagttggtctggatgcaatcagagccccagaacttttgaaaggttcccagctgatttcaatgtgcagccaagactgtgaaccactgatttggccaaactgcttaaaggagcaaacagggaaaacgaggccttagtaagtgaaatgtttaccactagtcacgtggccagccaggcacaggcctggcactggacctgggtcacctggctgccaggccgatgctgtcttcccagcatgctggtgtgtctttctgcaagaacaggggaagggcagggtggggcaatggagaggcggaagtagcagggatcccctggcctggactcctgagaaaatgcactttggccagcctggctgccagggtgtggtccgccataaaaaaggcatcctgaacctcctcccctgagtgggtgtggctacaggtgcaggggaactgtagatgaaaaggcttggcacttgagggaaagcctcagttcattctcattttgctcacctgttcggtccattcattcactcactccccgttcactgattcactcattcactcacacgttcactcaacaacactcatttttttcttatttaggggaacacacgttcttcttttaattcattttattttttgagaaggagtttcgctcttgcccaggctggagtgcaatggtgggatctcagctcactgcaacctccatctcccaggttcaagcgattctcctgcctcagcctccctataaatagctgggattacagctgtgtgccaccatgcccagctaattttttttttttttttttttttttagtagagacggggttttgctatgttggccaggctggtcttgaactcctgaccacaggtgatccacctgcctcggcctcccaaagtgctgggattacaggcgtgagccaccgcgtccggccttttagttaattttaatgtttaaaattaaagtattacatgttctagttaaaaaaaatctactggtactaaaaatcagagccgattaggaaggaagaaggcaaagtgtgttggggggacaatcaactgccacacaggccttggcatatgacttgttccattcattatgctgggcacttagtgggcccttttatccatgtattagttttgcttgtgtgtgagcctgtgagaggtagcttttaattctgatatagtttcaaacttacagaaagttgtgcctggagtagtggcttatgctaaggtgggaggatggcttgagcccaggagtgcgagaccagcctggccaacatggtgaaactccatctctacaaagaataaaaaaaagaaagagctttacttctcatccattcattcatttattatcattgtgaactcatggattcttattttattcagtgggtcacaatccatcactatcatgatctattttgatgctttaatcatcccaactttgtccagcattttatcctggcagctgtttcccatatcctttgacatatccccattattttgtgagcactttctttttttttattttattttttagacggagtcttgctctgttgccgaggctggagtgcagtggtgtgatctcagctcactgcaacctccgcctcccaggttcaagcaattctcctggctcagcctcccgagtagctgggaatacaggcacacgccaccaggactgggtaatattttttggtatttttagtagagagggagtttcaccacattcgtcaggctggtctcaaaatcctgacctcaagtgatccgccctccttggcctcctaaagtgttgggattacaggcgtgagccaccgcacccggactgtgagcactttcttatttcatggcacatcaagatgttctgggttccattgtactttccctgccccagccctgcgatcaggcatttctccaaggagccaggttattttccatgaggcacaggtgtgatcattcccatggagatgtcattgcttctaggctcttcccgtgtgcagagctaggagcacacatgcatatacgcacataaacacataaacacatgcatctatttctgtatatagatatatgttttaaaatcaatctaatttatttagtttcctcttttgtgtgtgtatatatttaagagaacaacttcatatttctagtcccattccaacaccaaagggttctcccttgctggcttgcttgccttcctttcttcctccgcctttctctctttctttctattttaaacaacagaaatttattctctcacagttgtagaggccagaaacccaagatcaagatgttggcagcattgattccttctggaggctctgaggaagaatctgtttcatgccgctctcctgttctggtggttgccaaaatccttggtgtttctggcctagctgtcttcagttccatattgtaactctcttctccaaagggtaaaatctggctcctaacatctttgatacatttactcctttgctcagtccaattcacagaaagtttcagaattgttcatttgaaatatatttaggttcattgtttctgtttgtataagaggattcttcccagtccttgttgcttttatttatttatttatttatttatttaagacagagtcttactctgttgctcaggctggagtgcagtgacgtgatctcagctcactacaacctccacgtctcgggctcaagcaactctcatgcttcagcctcctgagtaggctgcaccaccatgcctggctaatttttgtattttttgtagagacagggtttcgccatgttggtcaggctggtctcaaactcctggcctcaagcaatctgcctgcctcggtctcccaaagtgctgggattgcagacatgagccactgtgcctgtcaatttattatttcttgaatatattaatcattaaatggttctgtaggtagagtcaaaacattgatattttaaaaagtgtcgttttacttttttatcccttccatttcattcccatctatctatcccctgtaggaaactaatctcattcgtttctgacttacccttcttatgtttctttttgcaaaattaaatagatacgtttttggccggggcacggtggctcacgcctgtaatcccagcactttgggaggccaaggtgtgtagatcatgaggtcaggagttcgagaccagcctggccaagatattgaaaccccatatgtactaaaaatacaaaattagccaggcgaggggatgggcacctgtaatcccagctacttgggaggctgaggcaggagaatcacttgaacccaggaagcggaggttgtggtgagctgagatcacgccactgcactctagcctgggtgacagagcgagactccatatcaaaaaaaccaaaaaccaaaaacttttttttttttgagacgcagtctcgcgctgtcgcccaggctggagtgcagtggcacgatcttggctcactgcaagctccgcctcccgggttcacaccattctcctgcctcagcctcccgagtagctgggactacaggcacgtgccactatgcccagttaatttttgtatttttagtagagatggggtttcaccatgttggcaggctggtctcgatctcctaccttgtgatccacccaccttggcctcccaaagtgctgggattacaggggtgagccaccgtgcccggccatagcagcctgattttaacccaccacctaatactgctcctccctgcactgttttgtgattttgacaaaacaacccattagcatctccttctgacaggagaccaccaactgtggagtggttctggccattctgcagaggatgtgcagtgaaggtcttcctgtcttctgcgtcaccttttgatatcagagggctaaaaactccatgctccaatcgtgctaatgccaccattttttgaacatgggtcccgtggagaagcaggaagcacaattacacacgggcctatttctccattcataaatattcatgactcctccaatagcttattgaatatgtatatctggccacctcgttcagcgtaaatccctgtgttattcttcccatccttgaggtgttggcttctggctatgcttctcagcctgtcccacttgccaccctgtaggctgcaaccccgtgtgagaaagaaggctctcctttccaaatgtatgaacgctgtcattcttcagtcgacacagttgagaaggcagcctcacagagcccggcacacctgtgctgtggagaagacagctgagggctctcagcacccccagaaggcctcgaggctctgtgaaaccactgggcctgaggttgcagtgaagggtgagactgaaatcaacacacttttcctgtttctgtgataaacaatacagggaccagagaaaaatagcttggctgcttgctcctaggagataagactgcaaagcaactattaggttggtgcaaaaataattgtggtttttgccatttaaaagtaatggcaggccaggcgcggtggctcacgccctgtaatcctagcactttgggaggccaaggtgggcggatcacttgaggtcaggagttcaaaaccagcctggccaacatggtgaaaccctgtctctactaaaaatacaaaaattagcggggcgtggtggtgtgcgcctgtagtcccagctgcttgggaggctgacgcatgagaatcgcttgaactcaggaggtggaggttgcagtgagctgagatcatgccactgcactccagcctgggcgacagagcgagactctgtctctaaataaataaaagtaatggcaaaacccacaattacttttgcaccaacctaataaatagtacttggctcctagctgacccttgtgtttattgaatcaatgaagaaaatctagttaggcatggtggctcatgcctgaaatcctgacaatttgggaggcctaggaggtaggatcacttgagcctatgaatttaagtctagcttgggcaatatagtgagaccctgtctctacaaaaaaattattttttttgagacagagtcttgctctatctcacaggctggagtgcagggcgcaatctcagctcactgcaacctccgcctcccaggttcacgccattctcctgcctcagcctcccgagtagctgggactacaggcacctgccaccacgcctggctaattttttgtatgtttagtagagatggggtttcaccatgttagccaagatggtctcgatctcccgacctcatgatccgcccgcctcagcctcccaaagtgctgggtttgcaggcgtgagccactgcgcccagcctacaaaaaatttaaaaaatagccgggtgtggtggcatgtgcctatagtcccagctactcaggagtctgaggtaggaggatcacttgagcctgggaggttgaggctgcactgtgccatgattatgccactgcactccagcctggtgagggtggagagagagagacagataaaataaaatctgtaccagattctaagattggagacccgagagagagagagcgaaagaaaaaataaaaatctataccagcttctaagattggagactcaacaaataatccagtttcgttgtataaaaaatatggcagctctgggagggcgagactgtcatgggggtagaagtcctattcttacttctgagtatggagtcataggcaatttgtttatcttctctctgagcctcagtttcttcatctgtacaatgggagataataataccatctattctacttgtgaggatgattcaaggatagaatatacaaaaatacatactgtgaattttttttttttttagacacagtttcgctcttgtcgcccaggcaggagtgcaacggtacaaactcggctcactgcaacctcagcctcctgtgttcaagcgattctcctgcctcagccttcctagtagttgggattacaggcatgcaccagcatgcctggctaattttgtatatttagtagagacgggttttcatcatgttggccaggctggtctcgaactcctgacctccggtgatccgcccgcctcagcctctcaaagtgctgggattacaggcgtgagccatcgcgcccgctcattctgtaaattttaaagtcctgtatgagttgttggctattgccattccttgagggaatcctggaggccttagagaagccaattcagataaaggccttgggcaaccactagggatcaggagaggactggatgtttcttcagggacagctctctttaccaaagacccttcacctgctagcaccaccttccctccaccgtttcgttttgttttcctcttgggagtggggcactattgtagccataccattcttttctttgatcttggaatcagcaaaaaggcttgattgagtaggatgatgacttcaccttgaacacacatgtgggctgttgactaccttatagtgctggggccacaagagtaggtggaagaggagagccccagggcagttgctgggttttgacttcatgagatggcaatttgaacaagggatggaagggaaccagggcaagtcaaaaagcctaactttgccaggcacagtggttcatgcttgtaatcccagagctttgggaggccgaggccaggagttcaagaccatctcaggtgacatagtgagactccgtctcaaaaaaaaaaaaaaaatttttttttttgtggacagagtctggcactgtcatctaggctggagtgcagtggcacaatctcggctcactgcaagctctgcctcccaggttcacaccattctcctgcctcagcctctcaattagctgggactacaggcgcctgccaccatgcctggctaattttttttatttttagtagagaggggtttcactgtgttagccaggatggtctcgatctcctgaccttgtgatccgcccgcctcagcctcccaaagtgctgggattacaggctcacgcctgtaatcccagcactttgggaggccaagacatgtgtatcacctgagatcgggagttcaagaccagcctgaccaatatggtgaaaccccatctctactaaaaatacaaaaattagccgggcgtggtggcacacgcctgtaatcccagctacttgggaggctgaggcaggagaatcgcttgaacccgggaggcagaggttgcagtgagccaagatcatgccattgcactccagtctgggtgacaagagcaaacctctgtctcaaaaaaaaaaaaaaatatatatatatatatatacacacacacacacatacatacatacatattacaggcacgagccgccgtgcctggtcagaaaatatatatatatatttcctgaccaggcacgatatatatttcctgaccaggcacggcggctcgtgcctgtaattctcacactctgggaggctgaggcagaaggatgcttgggcctgtgagttctaaagcaacctaggaaacatggcgagaccgtgtctccagaaaaaaaattaaaacataaagtagccaagcatattgtcatgggcctgtagtcctagctacttgggaggctgaggtgagagtatcacttgagcccaggtgatcaagcctgcagtgggccatcatcatatcactgcactccagcctgggcgacagagcgagatcctgtctcaacaacaacaacaacaaaatttcccagggcctttgtattaccttgtaaataaaaaacaatgaatatggtaaaaaaaaaaaaaccagcaaaaaatcaacaagcatttagatacaaatgggaagaaacagagcagggcagggagagtcccgcagtcagagaacatcacggctgggtggacaggtgataggactctcaccccatagctcttctcagctggcctgtctgctcaaatcttctggaatgggaaagatacccacaacccaggagaaactaaacagcagcagcaccataaggagacagacacagatggcatggagaattcttacacattgaagccttgtgatataggcggcactgcaacagacaggccatcctgccacccaacaagttatgctgtttcttttctgagagacaaagtcttactctgtctcccaggctagagtgcagtggtgcagtcatagcttactgcatcctcaaactcctgggctcaagcaatcctcctatctcagcctcttgagtagctgggtctacaggtgtgcaccatcatgcctggctaatttttttttttgaggtggagtctcgctctgttgcccaggctggagtgcagtggtgccacttcggctcactgcaacctctgtctcccaggttccagcaattctcctgtctcagcatcctgagtatctgggactacaggtgcacgccactacgtccagctaatttttgtatttttagtagagacggggtttctccatgttggtcaggctgttctggaacttccgacctcagatgatctgcccacttcggccttccagagtgctgggattacaggtgtgagctaccgtgcccagcagctatgagtttccttctaagaagagagagacagcctgggcaacatggtgaaacccccgtctttaagaaaaacataaaaattagccaggtgtgatggtgctcacctgtagtcccagctacttgggaggctgagtcaggaggatcgcttgagctaaggaggtggaggtggcagtgagctgccactgcactctagcctgtgcaacagactgtgatcatgtctcaaaataatttaaaaaaaaaagaagaagaagaagaagagacaggagagagcttgcttcccctgtgtctctgcaccatgtgagggcacagcaagaaaatggccatctgcaagccagaaagagaacactcagtagacatgggatctgccagagccttgatcttgtacttcttagcgttcagaaccttgagaaataaatgtttgttggccgggtgcagtggctcaggcctgtaatcccagcactttgggaggccgaggcaggtggatcgtgagatcaagagatcgagaccatcctggccaacatggtgaaaccccgtctctactaagaatacaaaaattagccaggtatggtgacacatgcctgtaatcccagctactcgggaggctgaggcaagagaatcacttgaacccggcaggccgaggctgcagtgagccaagatcgtgccactgcactccagcctggcgacagagtgagactccttctcaaaaaaaaaaaaaaaaaaaaaaaattagccaggtgtgctggtgtgtgcctgtgatccagctactcaggaggctgaggtgggaggattgcctgaaccaggaggtcgaggctgcagtgtgccatgtttgccatgttggcaacactgcactccagcctgggtgacagagcaagaccctatctaaaaaaaatttattaaaaaaaaatgcctgttgtttaaggcaccagttgatggtatcttgttatagccccctaaaataagacacccctcccaggcgtctcccactaagacacaatggttcccagaaaagcatgagccttgtctgttttgtttaatgatgtgtgcccagcacataggtcagaacagttcctgagacacaatggtgcccatatttgttgaatgaatgaaagaatgatgaatgtatgagcagtttgatatgaactttctaatattttttctaggtatataccagtacaggtatattaagaaaaaatatggggtcatggtataagttgggttccgaacttacttttttattaacaattcattgtgtatatatctccatgttacattataccagggtttctcaacttggatactactgatatttgtgtgtttttttttgtttgttttttttatttttgtgtttttttgagatggagtctcactctgtcgcctaggttggagtgcagtggcacaatctcagctcactgcaacctccacctcccgggttcaagtgattctcccacctcagccttcagagtagctgggactacaggtgtgcaccactacacccaactaatttttgcatttttagtggcgacggggtttcaccatattggccaggctggtgtggaactcctggcctttggtgatctgcccatctcagcctcccaaagtgctgggattacaggtgtgagccactgcattgggcccactactgatatttgatgccggatcattctttgttggaggggagctgtgctgtgtatggcaagatgttgaggagcatccctggcttctacccacaagatgcaactaacaccttcccaccccactgcaaataataaagaatgtctccagatgttgtcaaatgtcctctggagggcaaaatcgcctccagtggagaaccgtgggtttatatcaatctacctcttttattggcggcataagagtattccagagtgtggctgtggaatttcttttagctaatttctctttgatgcacaattgtttccaggcccttgactccctgagcacttgtgtgtttctacaagaagcttcaggactgaggcaagagcacgctgggaccaagctgagcctctatggacggcgcatgacggagccgtttcactccatgtttgttgatggtaggaactgccaccctaatctttgccaatctgatgtggtttgtaagcaatagcacttcttgtcttgttctcttgtataattgtatagactgttccttctacaaaaaatgtcaaataacagtaatgaccacaaggaaccccttctggccctaactttggcagtgcacttggaataactagtatcacatagttacgacgtatgtgtatgtttcacatgaatataaactcacttcccaaacagtctgcaatgggagtttgaacgttctctttgaagataaagttgtttatgacaatatgtgaagctttgaagtttctcagtgattggggatttttgttttcttatttcctatttctaattttttcaattgtggtcaaagaatagggcctgtattatttctttgagatgggatctcgctctattgcccaggctggagtgcagtgatgtgatgatggcctgctgcaggcttgatctcctgggctcaagtgacactctcatctcagccttccaagtagctaggactacaggcccatgccagcatgcttggctagtttatgttttatttttttttgtagagacagggtctcaccatgttgcctaggctgctctaaacttatagagatttccttcttactccgggtcgatttttgtaaatatctgtaaaccttacattatcatcatttgtttaatgatgtgtgcccagcacataggtcagaacagtgcctggaacagaaggatgccccatacttgttgagtgaatatttgttgtagaatgtgagctacacaggaacagagattttccccccagttgtgtccccagggctttgaacaatacctggcatgtggctggtttgcaatataagtttgtggcccttgtaaagctggagccattgattatgacatgaacttctgaggaaccttattgttttgttttaaaagtatctgatacgggctgagaggtgtttctatttgtctatttttctatgcattttagagtttttctggctgggcacggtggttcatgcttgtaatcctagcactttgggaggctgagttgggaggattgcttgagcccaggagttcaagaccagcctgggcaaggcagtgagactctgtctatttaaaaaaaaaaaaaaaaagaaagaaaaaaaaagaaaaattacccaggtatgttggttgcgcctttagtcttagctactcaagaggctgagatgggacgatcgcttgagcctaggaggaggttgaggcttcagtgagccgtgatggtgccactaccctcccagctgggtgacaaaatgagaccttgcctcaaataaacaacaacaacaacaaaaacaggcctatagtcccagctgcttgggagactaaggtggaaagatcgcttgggcccaggaggtgtaggctgcggtgaaccgagatctcaccactgcactccagcctaggcaacagagcaagatcttatctcaaaaaaaaaaaaaaaaattctgtgtatatgttttgtgggtttttttttttttgagacacagtttcactctgtgcccctagctggaatgcagtggcgtgatctcagctcactgcaacctctgcctcctgggttcaagcgattctcctgcctctctcccaagtagctgggactacaggcgcccgccaccatgcccggtaatttttttttgtatttttagtagagatgggggttcactatgtgtttgtttgttttttttgagacagtctcactgtcaccccggctggagtgcagtggcacaatctcggttcaccgcaatctctgcctcccgggttcaagtgattcttgtgcctcaggcttccaagtagctaggattacaggcgtgtgccaccatgcctggctaattttttttgtatttttagtagagacagagtttcgccatgttggccaggctggtcttggactcctgatctcaagtgatccacctgcctcagcctcccaaagtgctgggattacaggtgtgatccaccatgcctggcctttattaattattattattattatttgagacggagtcttgctctgttgcccaggctggagtgcaatggtgcaatctttgctctctgcaagctctgcctcctgggttcaaagcgattctcctgcctcagcctcccgagtagctgggattacaggggcgtgccaccatgcccggctaattttttgtatttttagtagagaccgggtttcactatgttggccaggctggtctggaactcttaacctcgtgatccgcccgcctcagcctcccaaagtgctgggattacaggcgtaagccaccgtgcctggccctatgtttattattattattattattttgcactggcgttggattttattgcgagaacagactaaagagagcaatgtgtcagaagcgctgctcagccacagcctcttgggtggcatgggaacagagcggacgcattacggaaacccagttcttgggcaaaagataaggaagcgaagggcctcactggaaatctcctggcttctgggtgtccagggtggctgtcccaggcaggcgacggtcttcttggcggccaggctgcgtatgcgtcacgaggaagcctccagatggagcgcggccgccaaggcgcagtagcagggcgacgacgctccgagaggtccccatcgtcagacccctctggcttccatggcgcgtcttcaaacccggccgatcccggcgagtgtggcggccgcgcagcgcagtggcgaattcgatcttctgggtctccgggtggttcccactggggctctcgcgccgtctctctggagccaaaggcccccctcacacggctttcgccagtgcatcgcttttcccagcggaagttcacagagacagggggattgagaaggtctattttttatttgtcttttaaactgtagctataccagtgagtgtgaagtggtatcttattttggttttgatttgcatttccctaatgactagtgatgttgaacatctcttcttgtgtttattggccatttgcatgtcttctttagagaaacatctattcaaatcatttgcctattttattttattttattttattttattttattttattttattttattttatttgagacggagtctcactctgtcgcccaggctgaagcgcagtgatgtgatcttggctcactgcaacctccgccttccgggctgaagtgatcctcccgcttcagcctctcgaatagctgggattacaggctcgtgccactgtgtcaggctaatttttgtatttttagtagagatggggtttcaccatgttggccaggctgtctaggactcctgacgtcaagtgttctgcctgccttgacctcccaaagtgctgggattacaggcatgagccaccgagcctggcctttgcctattttaaaattgggttgtcttcttattgagttgtaagagcctttttacatattctggttacaagtccctgatcaggtatatgatttatgaatattttctcccattctgtggattgtctcttcactttcttgatgtgcacttttttttttttttttttttttttttttgagacagagtctcgctctgttgcccaggctggagtgcagtggctccatctcggctcactgcaagctccgcctcccgggttcacgccattctcctgcctcagcctcccaggtagctgggactacaggcacctgccaccactcccggctaattttttgtatttttagtagagaccgggtttcaccgtgttagccaggatggtcttgatctcctgacctcgtgacgcccgccttggcctcccaaagtgctgggattacaggcgtgagccaccgcgcccggcctatgtgttttacattatgttacttggtgcacgttttattttctggggtctttcccttttagcagtacaaagagatccgtcgtgtttcatataattttttgagcttcatgtcatgaccttggttttcttttggttcgcatgtgcctggatatctttgccctttttttttttttttttttttttttttttttttttgcgatggagtcttggtctgtcgcccaggctggagcgcagtggtgggaacttggctcactgcaacctctgccttccgggttcaagcgattctcctgcctcagcctcccaggtagctgggattacaggcatgtgccatgatgccccactaatttgtttgcatttttagtagagatggggtttcaccatgctggccaggctggtctcgaactcctgacctcaagtgatctgcccacctcggcctcccaaagtgctgggattacagacatgagccaccgcgcccagcgggcccgttttaaaagtcgatatcatttcccacctgtatcttgtgagcatagtcaacgctcagtgaaggtcagcttccttcctcttgcctgtcctcatgaaatgccccttcccataccgcccccgcgccccaggagtagcctttgctgtcccaggactgagctccaacatgggagcccctctcaatacctcctcttgagcctgcccctttccttccctgccattcccatgcaaggccactgggcagggcaggtccgcaccaccgagttgccattctccgtgtgtccaccaggggccgccccactcctgcctgagcttcctccaagaacctgcatttttaattcagtccctccctggtctcccatctctcccagcaccacctttgggtgtaaagccgcagagcagtattcctggttatccaaggagtccataaactgtcctgtgggaaatcagcccaatgcaccctggctccctcattcagcaactgtgttgtagttttcttgtctgcaaaaagaaaataataatttccacctcacttagaaagaatatgtaggctgggcatggtggctcatgcctgtaatcccagcaatttgggagaccaaggcgggcggatcacttgaggccagcagtttgagaccagcctgggcaacatggcgaaacaccgtctctagtgaaaatacaaaaattagccaggcgttgtgacacatacctatgatcccagttactccagaggctgagcttgcagtgagctgagaccgcaccactgcactccaacctgggcaaccaagtgagaccctgtctcaaaaacaaaacaaaacaaacaaaaacagaaagaaataatatatagttcgggagcctgaggcacgagaatcacctgaacctgggagatggaggttgcagtgagctgagatggcaccactgcactccagcctgggcaacagagtgagactgtccaaaaagaaaaagaaaaagaaaagaaaagaaaaaagaaaaataaataatatatagtgttcagcaatgtgcctggtatacagtaggtgcctaataaaagcaagtcactttacaagagttcaaagtccgtccctccacaactctccctaaagctctccaggcctgtctgttttcttaggtaatgggttggcacccaggttacatgggggtgagatctccttgtaggggcacaagcttcatgggttacaaagtcagaagtgtgaatgtttctattttctataattgacttggatttccacctccatttcccatgttgcacgatgtggaaacatttttattacagaattcagggtttcctcagtcaattcttttttttctgcgacggagtcttgctctgtcacccaggctggaatgcagtggtgcgatctctgctcactgcaacctctgcctcctgggatcaagtgattctcctgcctcagcctcccgagtagctgggattacaggcatgtgtcaccatacctggctaatttttgtattcttagtagagacatggtttcaccatgttggccaggctcgattccaactcttgaccttgtgatccacccgccttggcctcccaaagtgctgggactacaggtgtgagctaccacgcctggcctcttcagtcaattctaagtttttgcctccccctttgccctggggtcccagctaatggtgtcagcagggagagggctctgatcttggtcgttctcgttttctctgctggtatctgtaaagatggtctctggccctatcgggcatcatttgctgatttccgttctcactggattcattactgcccgtgtccatcccatcagcattcaccatgagggcccgcggcccacctggcctccttgttataccatcctgatcctgagcttcatgtggtcccagaaccctctctcagccacttcaatgggaaactgtggggaggggtttgtctcaggccctctctgcccagacaagccacagcagcatgtctccttacgtgtagagacatgagggtgttctgggagatggtacctcagtgccttcaccaggaagtgccttcaccactgcgcccctctactccctgagctctgcagtgcccctactgcagcccagacaacagggctggagtggggaggagagagccatcgtgtgatcagtgtttttactgaggcaaggacctcaactttgaagctagtatccaagacctagctccactggcttctcttcatttcttctgaaacattcctgccccaaggacatccttgctgccacctgcattggggcggggcggtatgacatgctagagaaagaagcctggttaacatttcctaatctagcttggcacatcttttgccctgttttcagggtactcctagtacagactgacacatgcccgccccatagcaccctagggaagtttatgctcccagtaatgagtagggcagagccaaggtggtggatgaggttttctgagggttggtactcagccccttctgggaggggagacgatcctggttgtaaacaatagaaaacaaccctggttaactatagcccaaaaataattttctggaatgatgatggatggttcatagagtcacagggtaaactggaaccagcctgacaaattgggcaggaacccagaaggctgggaggcagaatcacagggagggtcttatgaggacaatcatgccaacctcacaaccatcactgccctttgatggtggcagctgggaccccaacattagaggagtgacacctcaatggtcccagcttctcaataaccctcagtcagtgtcaaagtcctaggcaggatgaaccaaggctgagttcccaagcaccccctgcaggaattggatctttggcccccttaggcttccatagggggaacactgcctccagcccatcttgagatttgtatcctcccctctcgattggtatttggatgacaagcaactaaaatcagcaaatgcacacatctctctaatttccctgaatgtgcatttgccaagaggcagtttcaaacctgcctcatttgagcagtctactcagagtgctgtttgtttatgccactcggagagcttgccaaatacagtgaagtcatctgaacagcctgagcgcttccagataaatacattggcctcctttccatggcccccatagtagctaacatgtactgaacagtgggccaggcactgagctcagcgctctacctggaggattgccttgggccttactgccatttttccaaggaagagactgaggcccagtggtttactagctttccccagttcacacaggtctagatgggaataacagggacttgaccccacacagcctgtcgggccctgctccctggtgatctaatggagcagacgttaaaccaataaccacaggattacgtacgtgattaaaaggagcactggaaagggaaagaacagggtaggaggagggaggatggcagagaagacaattcataggggtggggtgggtgggggtcccgggaaggcctctggaagaacatttaagctgtgacccaaatgatggatttagccaggccaagagcgaggggaaagaggcagtggcaagtaccgagacctctgaggcaggagagaggggaatgtgttcgggggatgaaaacaagggccaatgcagcgggagcagagggagctggggatttctgggtggggccatcaggcagggccaggctgagccttggtgttcttcagctcagaacccctcacctcctctcactgacccccaccccatcctctgagatccgacctcacagcatagtcagatccaacctcttctccccacctccgctgcggccaccctagtctgattattgcaatatcccctcccattcccactggtctccctgcttctgcaccgcccccatatctcttctttctcagcaataaagtgatccttttagcatggaagtcagagcttgccaggcctctgcttctcattttgcttagagtaagtgcctaagtcttgcaatggtctacaaagccctccacagtctggatcccaggagctcctgcaacgtggtcccctctctcacttggctgtagccccactggccctgtgctccttctcaagtacaccaggcaagcccctatctggaaggagggcctttgcactgcccgttcccttggcccggaatgttctttcctcacatatccatgggtctctcatccttcagcaggcctgcccgggcatgttctcatagtggagctcagggcaagaacagatggagatgctaagccctcttctgcctgcctccggtctgctaacatcctgctggccacagcaagcacgtggctgagcccagagtctgagtgggagggcaccaggatggtagatgcacacggtaaagacacagggagtaaagcactggggcccttgcacacatgattacagccccttgatctgagctccaaatcccaggcctcctcctgcacagcgacctgccaccatcagtaactctctccaccagccaccatcccattttcattcagcaaacatttgtggagcacctgcagtgtgcaggccctgttctagacactgtgaggcagctgcacataaagtagacgaaggccctgcccttttaaagttttgttttgtttttttttcttttttttttttttcgagacagagtctctctctgtcgtccaggctggagtgcagtggtgcgacctcggctcactgcaatctctgcctgttgggttcaagtgattctcccatctactcgggaggctgaggtaggagaatcacatgaaccccggaggcagaggttgcagtgagccgagatcgcgccactgcactccagcctgggcaacaagagtgaaactgcatctcaaagaaaaaaaaaaaagaaaaagaaatcctatgtgtagggacaatggggaggcaagtggtcaatatctagtgctatgtgaatctcagcaacaaggaagtgggtcagaaagcagccaaattaaagcttaattataactctatttctgtccagaacctgacatgtgattcttgttaaccctgtggggatagtttcagtggctggaacagagtgagcaaagaagagagaggactgttagtgggtcgcaggcagggaggtgaggcaatctgaatgatatttccaataggccactccatgtgcagacagaacctgggttggagaagaggaagaagggaagtggggagtccccttaggagggtattgccatcgtcaaggtgagagttcgtggtcgccatggtggtcagattcaggatgtacattgaagggggcccaaataggattcgccagtgcattggaggaaagggaggtaggagtcaagaatgactgacactatttttttttttgaaatggagtctcactctgtcacgcaggctggagtgcagtggtgcaatcttggctcactacgtcctcctcctcctcctgggttcaagtggttctcctgcttcagcctcacaagtaactgggattacaggtgcgcgccaccacgcctggctaatttttgtgtgttttagtagagagggggtttcaccatgttggccaggctggtcttaaactcctgacctcaggtgatccgcccgccttggcctcccaaggtgctgagattataggcatgagccaccgcgcccggccaaggatgactgacattttgaatttgaacaagtgggtaaatggagttactgtctactgagatggggagtgctggggtagggcctctgctttagacataaaaggtatctgagagcacagggtctttggaacctggtgtctaaagtagacaaagagactggcatctcaggtaggagtgcaggcttggggagccccaccttccacagtgtgggggaagcaggaggccgtcagagtctcactagccatcctgttcattcatgaattcatttattcattcattcagtaaaaatttatggagcaccaaggataagccagacacttttctggatgctggaaatagaggagaacaagaggcggtgttgccagtctaatttggttccttacctccaggtagaagagacaggtaatgaataagcaaacgtgtaaaagagaagatgatcttacagaaggacggtgtcacaaggagcagtagagggtggtagggagtgccagggaaacagaattgggtagggggtcacccaggcagccccaaggaccagtcccagactcccaggaggacctacctcagtttgtcttctttttgtcccacagaatggctgctataccattaggaaggggagggaagaggagtggccctgcagtgaccctcaggggtctttggaggggggggctttgtcctagaggaagaatctcttcgcagggtgctgtggctcatgcctataatcccagcactttgagaggccaaggcaggtggagcacctgaggtcagaaactccagaccagcctggccaacgtggtgaaaccccatctctaccaaaaatacaaaaattagccaggcgtgttggtgcgtgcctgtaatcccagctacttgggaggccgaggcaggagaatcacttgaacccaggaggcagaggttgcagtgagctgagatcatgccattgcactccaccctggacaacagaaaaagaccctattaaaaaaaaaaaaattcgccaggcgtggtggcgcatatgcctgcagtcccaactactcgggagggtgaggcaggagatcacttgagcctgggagtttgaggctgcagtgaactatgattgtaccactgcactttagcctgcgagacagagtggagccctgtctcaaaaaaaggaaacagcgggtgtggtggctcacacctataatcccagcactttgggaggccaaggcaggcggatcacctgaggtcaggagttcaagaccagcctggccagcactgtgaaaccccatctctactgaaaatacaaaaatgagccgggagtagtggtgaacgcctgtagtcccagctactcaggaggctgaggcaggagaatcgctcgaacccaggaggcagaggttgcagtgagctgagactatgcaactgtactccagcctgggtgacagagtaagactctgtctcaaaaaaaaaaaaaaaggaaacagagaacccatgagaggtatatgctgtgttcccacagagcaaaactgctcagcccactgcaaaattcttctctgagtgtgtggaaatggggttgctcactttctaccatttgagagtttctgctatgcaaagaattttctttgtgcttcctggtgctttatcctgcaaagaatgggagagtgaggcctgtgaaggctcataagccaaagttcccatctgagctctgccactgcatgatgggtgacctcaggtgatgtgttcgtgtcctttgggacagcaagagttaatatgggggagcaatttagttaaaagagattttgaagaagctgaactcagacaattgtgagcaagcttcagggatggttctggttattgagacaaggaacaagacgaatactagaacctgcgctgaggctgtggcaggctacggagaagaggaggcaatgatatctgctaggagagtgttgcattatggggctgagggactgggagggccatgggcattcctggggcttccagtttgggcactggagtgaatgatggactattaactgggagtgagcacagaaggagaagccagctcagagggaaaaggatcaggttctgttgaggacacgaagcgtgagatgactggcagatttctagaaacacggatgtgaagttgaggaaggaagttggacccataagtgcccagtcagaaatcctcagggcctggatggtgcttgtgcagagaacgaccagatgataactccagctgtttccctttccttctagggacacatccagaatacactttgggccaggcacagtggctcacgcctgtaatcctaatactttaggaggtcaaggcaggcagatcattggagcccaggagttcgagaccagcctggccaacggggcgaaaacccgtctctacaaaacaacaacaataacaacaacaacaaaaattagctgggcatggtggcgtgtgcctgtagtcccagctacttgggaggctgaggtgggagggttgctggagcctgggagttcaaggttgcagtgagccaagatcacatcgctgcactccagcctgggcaacagaggcagacttggtctcaaaaaacaaaacaaaacaaaagaacacactttgcagcctccctccattgagggggctgctttctgtccagtggaatgtgagtaaagtggcaaagccacttccaggtctggcctatgaaaatctacccttagctctccaatcttctcctctaggcattggccgactttttctgtaaaggaccagttggtaacggttttagacttcatgagccatgccatctctattgcacctaatcaactctgccgttgttgtgtgaagacagccataagcaatatgtaaatgtgtctgtgtttcaatgaaactttatctactaaagcagggccacagctactcttctctctctcttatttgctacctgaattctgatattcagatcgcctttagaagccacatgttgaaagtggcacagcctcccgttgtctgagacactgtaagaaacccagacaagaaaaccagatggggtgcaaggaatcggcgatttccgtttcttacagcagaaatggaggtcccccaattccttgcccccatcctccttttatggagtaagaaataaacctgtattgtgtttagcaactgaaatttgggggtggggtatctcttccataagttagtgttactttaactaagatagaattagtactaggagcgggatattgccataatgaaaatcgaaaatgtgtggcattggttttgtagttgggcaagatagtgagaaaacctttgtcagggtttggaaagatggagacccatgctaggcaacggcaaaacatttggtaaaatagttgcctgagataaacaggtcagctgtcctctgaccctgtagctctaagggaagaagtcataaagtacaggcagcacttaacaaggtctcagaagaataagatgggaccagtgagcactggctgatttgcaagcaaaactaagatgaaatagggactcccggaatttggggtattggttaggaacattgacggcttctagatgccaaacagaaggaaatcatagcttaaaggcctttgagcagcaaaggcccatgaagcctcaacctcaggcaaggtcagagtcagggagtgtccttccccaggcctgagaacctcaagattgccatcagcacatcgagagagaatggccggagggcggacagcagaagaatcaggctggagaactgtgtctaactgtgaatttcgcacgtggttgctggcatccagaaatgactggaagcaagtagaggagccttttcagattttcagggaactgtatgtcaaataagccataagcctgaacttcaaaaaataaacaaataaaaaagagagaaagtgtttgaacttttgggccttaaaaccaccttgaggctggatgtggtggctgacgcctataatcccagcactttgagaggctgaggcatgtggatcacctgaggtcaggagttcgagaccagccttaccaacatggtaaaaccccatctctactaaatacacacacacacacacacacacacacacagttaactgagcatggtggcgcatgcctgtaatcccagctagttgggaggctgaggcaggagaatcgcttgaacccgggaggtggaagttgtggtgagctgagattgcgccattgcactccaggctgggcgacagagcgaaacttcgtctcaaaacaaaacaaaacaaaacaaaaccactttgagatcttaaaacttttacccgaaggagctgcaggctacaaaagatgagcagcaacccgggagggtctacccctcaacggtcgctgcgaatgcggccttggagcaacatggcaagacgacagtgtggagggcagggctgggagccatagagaagaggacagggcaattccttcaagggtgggggcgctcccagcacccacctggccaaatggcatcatcgctgtcatcagagcctgctttgcatcttctgttcttcccttctctgaagaggatgttgtcctgtgcttgccctatctgcaccccaccactggatccggaagtgtgttgtgtgtctatactggggtggagaaaggaaggacacgataacttgttcttttaggcatcggtttccagatcacagggagtcacagaggacctggaggagagaatcctgtgtgtgctggagatcccgaactgtggcggaggccccaggaggcagtgatggtgtggactcagctgcctctccgggaagcagtgagtgtgttccatgtgtaagaggaagagtgaaatggctacttagtggctattgggcaacccatggcagagactggctagaggcttacgaacgctgtcttagtccattttgcattgctgtaaaggaaactgaggctggtaatttataaagaaagaggggtgtttggctcatggttcttcaggcagtacaggaagcatgataccagcacctgcatctggggaaggccccaggaagcttctactcagggccacaggacaagggggagcaggcacgccacatggccagaacgatgccaggctcctttaaataaccaggccgggtgcagtggctcacacctgtaatcccagcactgtggccaaggtaggaggattgcttcaggccagaagtttgagaccagtctgggcaacatagcaagacgccatctctaaaaaaaaaatcaggctgggcgccgtggctcacacctgtaatcccagcactttggagggccgaggtgggcagatcacttgaggccaggagttcaaggccagcctggccaacatggtaaaaccttgtctctactaaaaatacaaaaattagctgggcatggtggcaggcacctgtagtgccagatactcaggagggtgaggcatgaaaatcacttgaacccaggaggcagaagttgtagtgagccaaaactgtgccactgcactccagcctaggtgacagagtgagactctgtctcaaaaaaaaaaaaaaaaaaaaaaaaaaaattagccaggtgtggcggtgtgggcctgctcaggaggctgaggtgagagaatcacttgagcctgggaggtggaagtttcagtgagccgtgattgcaccactgcactccagcgtggatgacagagtgagaccctgtctcaaaaaaaaaaaacagacaaaaacaaagcacccacatgaactaatagattgagagctcactcattaccatggggagggcaccaagccattcctgagggatccacccctatgatgcaaacacctcccaccaggcccactcctaacactggggctcatatttcaacatgagatttggaggggccaaacatctaagctatatcgaacgccagcccctctactgccagatgaactgctagatcacattcccgactttcattgcgttagatgtggccatgggcggagttcgggccagtggaaggtgggtggaagtgaggtacttgtctatcataaaaacccacacaaccttccaaaccattctccttgttctctccaggctgctgactggatacagatgtccaaggccaatgaggaagccatgtgtcaaagatggcagggggcagggcatggtggcttacaccagtaatcccagcactgtggaaggctgaagcagctggatcacttgaacccaggagtttgagaccagcctgggcaacatagtgagacaccatctctacaaagaatttaaaaactgggccagtcgtgatggctcacgcctgtaatcccagcactttgggaggctgaggcaggcagatcacaaggtcaggagttcgagaccagcctggccaacacagtgaaaccctgtctccactaaaaaatacaaaaaattagctgggcgtggtggcaggcgcccataatcccagctactcgggaggctgaggcaggagaatcgcttgaacccaggaggcggaagttgcagtgagccgagatcgcaccattgccctccagcccgggcaacagtgtgatgagactccatctaaaaaataaataaataaataaataaataaataaataaataaataaataaaataaaaaactagctgggcacagtggctcacatctgtagttccagctacttgggaggctgaggtgggaggattgcttgagtccagggggttgaggctgcagtgagcagtgattgcaccactgcactccagtctgggtgggtgacagagcaagactctgtctcaaaaaacaaacaaaaaaaaacttttgtgactttgtggaactcaggccaactggatttcctatgaagaaatacacttctattacattaagccactgaaaccttggtgtttgcctgtaatagcagctggtgtcaccttaactagagttgaagccatgggagcagagcaaccagagcagggagaggcaggaagagaactgaggcaggaccctggggacacctcattaaagagcggctgacacggaggtggcacaaaggagactgagaaggaagcaagaggaggatgagggcagagtggccttctggaagaaaaggaatgtggtggccaggcatgatggctcacgtctgtaatctcagcactttaggaggccaaggcaggtggatcacttgaggtcaggagtttgagaccagcctggccaacatggtgaaaccccatctctactgaaaatacaaaaactagccaggtgtcatggtgtgtgcctgtaattccagctactcaggaggctgaggcaggagaattgcttgaacctgggaggcggaggttgcaatgagctgagatcacaccactgcattccagcctgggtgacagagcgacactccgtctcaaaaaaaaaagaataggccgggcgcagtggctcacgcctgtaatcccagcacttcaggaggctgaggcgggtggatcacaaggtcagcagttcaagaccagcctggccaacatggtgaaaccccgtctctactaaaaatacaaaaattagccaggcatggtagcaggtgcctgtaatcccagctactccggaggctgaggcaggagaatcgcttgaacctgggaggcggaggttgcagtgagccgagaccgtgccattgcaccccagcctgggcgacagagcaagactccgtctcaaaaaaaaaaaaaaaaaaaaaggaatgtggttgacggagagagaagtgtcttagtctgtcttatgctgcaataacagagtacctgagactggataattatgaggaacagggatttatttcttatagttctggaagctgggaagtctaatattgaggggccggcatctggtgagggccttcttgccacatcatctgacagtggaagggcaagagaggtagagacagagagagaaaggggccaacttcatcctgttataaggaactcactcccactgagataacagcattagctctttcttgagggcagaacttcctggcataatcacgtctcattaggccctacctcaacactgttgcattggggattaagtttccaacacatgtttttgggagtacacattcaaaccacagtgagaagaaactctagatacgtatgtatacatacatacataaatatatgtacttttttttgagacagggtctcactctgtcacccaggctggagtgcagtgggggtgatcatagctcgctgcagcctcagcttcctgggttcaggcaattctcccacctcagcctcctgagtagctgatactactggcatgcacgccaccacacctggctggttttttttgttttgttttgttttgtagagatgaagtctcactatgttgaccaggctggtctcaaacccctgggcccaaggtccacccacctcagcctccccaggtgctagggttacatgcatgagccactgagctcagccaaacactatatatatataatataaaaatatatatgtacagaggcaaaggcttaaaaaataatttaaaaagtatatctatatttttcccaaactaaaaaggatgtgtcaattgaggccaagaggatgcaaacaatccaaagaccaaaagcctattatttaattaacttcctttctttgcttgttagatgagatttggatttgatgtgtctgttttcttggccctggtctgctcatgaaagccttctacagggggaagctgtgggcaggttcctatagcgactctttgggagaactctcacagggctgagtaattgcttagttctgcctgcttcgttcccttctgcttcataggtactacaaaatagttgttgtccacagtggtgagccccgcagtgagtgaaaacaagttctggaagttcagtgtgctgtcttggcactggtccatgtccttcattgttatgtctgcagccagagggtctttttgattctccaaaaatccaaggaactcctttcccatgagtactttcaggccctccttcattaagtagcctttatccccggcaaatctgtgaaacgtaaacaacacggtttccatggtgtgttccattggactggggttgttcgtgagatctgttgaaaccttggctggaggtgcgttgtgggcgcttggcaagctgggcctcagggcccctcgggaaggagcagtattaagaacttgttttgctatctcaaggacaaaaaaacaaacaccgcatgttctcactcataggtgggaattgaacaatgagaacacttggacacaggaaggggaacatcacacaccggagcctgttgtggggtggggggaggggggagggatagcattaggagatatacctaatgtaaatgacgagttaatgggtgcagcacaccagcatggcacatgtatacatatgtaacaaacctgcacgttgtgcacatgtaccctagaacttaaagtattaaaaaaaaaaaaaagaacttgttttgcaaaggagccctgggtcaggcacagggtctgaggctggccttgtgagggcccctttccttgtggggacaggccaccacaccacacggcagatgcagctcagggcaagatgcaaggtggcaggacccaggagagatgctcagtccaaagtggagcggtgttcaggggctctgggctgggagatttacgtgggggtcttaacttcttgaagtcatgaacccctctgagaacaaggcaagagctaaggcttgagagcaatgtaggcagccgtacgcgctatttcactccagcctcggggctctcatggacctcctgaggctggcccgtgggacccagggaaagagcctcggccttgcagagtctcttacaaccttgactagctgcctcccacaaccctgctgggatcactaccttacaaaggaggaaatagatgccatgtagaacttgcttggagtcacacagctacaagtgtgacgcctgaatttgaaggcaggtgtgtctgactgtcctgttcccttagcggttcagcacggggcctcttcagccgtcccaaggcatccccaacacagaaggcgtctagggaaggggtcaggggagggttcagggaggaggggatgtctgggctcagcaggtggcatggccatgggagcctcagggctagggagaacccaaggctgggagagaggcagggccttgctcaggacgtggcagagacaggggtgagctcaggcggaagcccgagctgtcaggcagccctgagtggccggagcggagtggtggacccaggagtggggagacgcctcatccagcagcccacggtctgtttccttctacccctggatcaggagagagcaggaggcctgacgttagctagacttccctctgcctagcattgtcattactcagcctttgcttttcttggcctcacaagcaaggctggggacaggaacgaatatgacagtgtctcaatcaccatagggagtcagaggcatttccctctaatctgaggcctccccgtctgaggccctgtgtatttgcttctagagctgccttaactaagtaccacacactaggcagctgcaaacaacagaagggtattgcttcacggttctggaggccaggagtctggaattcaggtgtggacgggcctgctccctccaagcctggagggggaagacttcttgcctcttttctggcttccggtggttgccagtcctcctggcaggcccagacttgcggctgcctccccgaagtctccgcgtcttctttctttcacacagagcaggagcatatgtctgtctctctgtctcttctcttctttcataaggacactagtcctattggattaagaacccaccctacactccagtatgacctcacctttgctaatttcatctgcaacaatcctattttcaaatacgtcacattctgagatactaggggttaggtcttgagcatatcttgtgataggaacatggtcctacccataacaccctgtggggtaatttacctttccctaagaagctctgaccctgaacacccttggactgtggcatccccaccctcacaccggcctgcagcaaccgccgacctggcagagccaggagctgtgggggctttcacagcccatgcctgggtgaccaaatccagctcctaccaccagaaccttccttccagggcggcttgtgagtggtgccatgctgggaacacgcagcacgcagcttagggcaccggctgctgccaccagcctccggttaatctcctccagcctcagcaagaatgcagcggtgacaggggctctcaggaaggcagggaaggaggggagacctggtgcttttctttcaagtggagaattctccccacagatctgctccaaggtgttagcagggagggagggagccaggtttccagcctgggcttcctgaccaacagtccctggccagccactgggccctggtggaggcggctgtgaggctggggtcagggaggggtgcaaagcccgctcagctctgggccaggtttccagcaggaggacctaagacagcactgagtcagctcaagcccacctcagagtcaggctggcttggtcattaattccctcctttgctccaccaacattcacccagtacttattacatagcaggggcatgcggaccgggagaccaaagcaaaacaacaggagagatgctgaggtcagccacactcagaggagggggcttggggaagggccctggatctggtttggagaggcagggagcattctccagtggggacatgttccaggtagagtgcatgcaagtcaaaggaaccgagacctggagaccctggggctctccgagggtgccagtcatccctcaggaatgggatgagccccgatgccaggaagggcaagcgctgaggccaaggacacaggcaggagtcagacgacacggcgtctgtaccagggagcttgggtttaatcttctgagccacgggacggcactgatgggttttaagccgtgtaaagacttgatccaatttgtgaattggatcatcctggctgcagtgggcaagctgctggggtgccaggaattgtttggaagtcattggtccaacacatggcagtggtgtgaccacctgggagaatgaccccgcagagcagacaagtggcccaggacgcacctttcggaatgtcagcatggggagggaaggccgggaagaggagctggtcagagagagtgtataagtggctggaagagatagaaagtggccttcagaaggcaggcggaggatggttagggaagatgggattgtcagtagcatcagatgcagccaagaagtcaagtgatgcaagaactgaatgtatcattggctttggtgattgggaggtggcctccgtgagtgcagcgtgaaggaggtcgaagccagcgggcttgccacaggctgacaggcagctggaaacttgttccttgtgcacagcagttatgaaggctggggagcagccttcttagaggaggaggaggaagaggaggaagaggagaaggaggaagaggaggaggaggaggagggggaagagctgctcctgatcaagttcccttgggcattgctggctgagcaggagcttcagcttgcagctgctttgggaccattcaccctggatggaagcctgagtgaatcattacccccagggtctaaggtgctgcattgtagcagcaaagagcccccattataacagcactcggctgatggcctactgcacgccaggcactgagccagggctttgtgcacactatttcatcgagtcctgcacaggggcattatagcctgggtgctgaggttcagagagaggtaagtgacttaagcaagaagctctgctagtcagtagcagagaagagatgtgaagccaggacgacctgaacccgaggctgtttcagcttcatcctgctgttgtcctaactcctgggagatatggctgagaagttctctttggtccttggctgttgggtggtaagtggtggacaggtggccatgcttatccaacctgggccaggaactggacttcaggtggctggatcattcatggagagagcggcagtggctagggttggcatgagtcaaggtaacaaatggccgatgctgtcttcttgaggggttctctgctctcagggtggtggtagaaccgtggaggcagtgggatgcaggtaccagggggttcacctggaatgaaatccttagccctgggaccctagatgggctctcggtctgaggtcagggtcaagggtcacaagtgctagacagggtcctccatgatggaaggagcctccagaatcctggagggtaattcacagtagactgtagtagccctctgaggagtgaagctttgagtggtggccatctctggagagaaggagggtacagctagtggagttgatggtctaggacagcccagtgttccctagcagtcatcctctgaggctgccacaatggctccgtgatttgggagcagagatgctgcacacagttgaccctcacatctatagcagccacagctggatggtgtgacaagcattgctgggtgctctcttttcatctgggcacacagcaagactgtatgcccagcttctcttgcagttagatgtggccgtgagattgagttccatctcagtggagggaacagtctgatgaaatgtgactgcttttctaggcctgcctgtaactataaaagccttccccacttcaccagttcttcatgccctttcccctttcattgctggatgtcaacatcccaagtgatcttgggagccatgtgttgaaggtgacagatcccgggtaattgaagacctctgtggcagagagctcctcccccagctccagggactgggcccacctgtgactgtttatgtgaatgagaattccacctcactacgcttgtgccattatcattctcaggcttgtttcttgcagcattaactgatcctgtctaatacagacagccacaaagccgttaggtcctgagatctcttagctttcatctccggctattctgtatctgttcagcagttttgactccccctagcctggagctgatgtggaatttgaactctcacgaggcacaagccaagtcattttctttggatgattatgttctgatgtgctgatgtaccatcttggggagccagaccctgtaaagtggttcatccccccgctttactgtgggtgtaattgtgcctggggtgttgacctcagctaggaccaactttctccaaatagacaggggcagaggtcacctgtgctggcttcctgttgcaattttatgtccccaccagagcacaaatagcactcccctaggtgaagtggctcaggaacaaggaggacagacagaaatgggtttctcagctcctggcagctcatgctgctaccaggcctttctccttctctaggaggctggctgtgaggcaggaggggaagaaaaaaggtgacagtgtttcacttttgttttgttttgtttttttgagacagggtcttgctctgtggcccaggctggagtgcagtggcacaatcatggctcactgaagcttcaacctcccatcctcaagcaatcctcctgcctcagcctcccaagtagctgggaccacaggcgtgcgccacaacactcggctaattttttatttttagtagagacaagatctcactatgttgcccaggctggtctccaactccagggctcaagtgatccgcccaccttggcatcccaaatgctgggattagaggcgggagccaccgtgcctggctgtaggtgtttcttgtgtctctggtgaaccctaggaagtatactcaaacgagtcaaaaccaaaccaaacaacaggccccgattggaaggacaccaggaagctgagaatggcagcaactggggtgtctctgaagacctcacaggccaccgttagagacccagcccctgtgggcttcagcagctccaggccacctccttccagtcctgccccctgcacctgtgaggcaagcttggcagaaaagtccggagaaagagatccaaagggtctggcttgtaacctctttaggtgggagaaacgagttcagtttgaatcacaggcctcaccctgcagcctgcggcagagtcttggggaaagaaagaagctttgctttcattaaaactcagaaacagccagaggcacctttttcttaaagccagtatctgcagagaaaaacagcagactggtctcgcttagtaagtgaaacagagggacctagtttagatggggaaaaagaaacacaaaacaaaggacaagaacccagtgagtttgctgagcgtatttgcagctgaagtgattgacagtgggtgcaggtcctgaaccatgactgtgtcctgtgctatcgagcttcatttcactcagttacctaaagtgtgttctacatcctcgagatttataatgatgataatggggatgataatgactcatgtattttattgttcctacttttcaggcacagttttttgtttgtttgtttgtttttgagatggagtctcgctctgtcgcccaagctagagtgcagtggcagatctcagctcattgcaagctccgcctcccaggtttaagcgatttgcagctaattttttgcatttttagtagagacagggtttcaccatgttggccaggctggtcatgaactcctgacctcaagtgattcgccttccctggcctcctaaagtgctggggttacaggcgtgagccaccacgcccggcatcaggcacagtttttaagtgagttatatgtcgtaaatcctcaaaatattcctatggagtaagtactattatcccattgtacagatgaggaacccgaggcacaaagttatatgaaaaaggctctgtagaaaaaaattagaacaacaaaaattatctttttctctctcttttttttttgttgtttttgcttttttggttttttttttatggagatgagggtcccactatgttgcccaggctggtctcgaactcctaggcttcacgatcctcctgcttcggccttccaaagtgctgggattacaagcatgagcctctgcacctggccactcatccttgtgtatggagtggctggacaaaacacaaagtcacttaagatagacactgaagagtctactttaattgcacatagggcctttgcctaatgagtcacataatcggggctccgtggagtcattaatatttcacatcttttcccatcagcacaaagtaaacactattttaataaccgcaatactgcttctttttttgggcccaggaaattgcttggttcattgttccattttagaaaagattaaacaaaattgattttcataattgtcattctgtactttttttttgagacagagtttcactcttgttgcctatgctggagtgtgatggcgcaatctcagctcaccgcaacctccacctccacctcccggattcaagcgattctcctgcctcggcctcccaagtagctgggattacgggcatgcaccaccacacctggctacttttgtatttttagtagagatggggtttctccatgttggccaggctggtcttgaactctcgacctcaggtgatctgcccgccttggccttccaaagtggtgggattacaggcgtgagccaccgtgccctacagtttttttttttattttttagacagagtctggacagagttttgccctgtcatccaggctagagtgcagtggtgtgatttcggctcactgcaatctccaccccccagattcaagcaattctgcctcagcctcctgagtagctgggactacaggcgcacaccaccatgaccagctaacttttgtatttttagtagagacagggtttcaccatgttggccaggctggtcttgaactcctgacctccagtgatcccctgcctcagcctcccaaagtgctgggattacaggtgtgagccaccacacctggactcattctgtactactcgtccccaaggggaaatcttatactttctgattccacaataagttctgaggaggaggtgaggagggttgctggtcagacagacactggggaatctacctaggaagtgtcaatagccagttcagcacacgcagaagtcctggctggacagaggagggcccaggtgttctgcatgtgggaacacagtccttaggaacagctggcttggaggcgatgctgcctaagccagcaactttttccaggccccactggacggcacccaaggacgttatccaggcgaatggtgactccctgcaggatccattcattagccacatggggtggggggaatgacatggggtggggggaatcccacaagccaagggtcagttaccaggtgcaaactgtccaaggaacacctggagaactttcttgcactttctgacctccagggtctcgacaagcctgggcgtgccccagaggtccagtttttatgaatattggagctccatgctgttcatccaggaagctcaaagttaaatgaaacacctggggaccccacagagttattatattgtgggggggtgctagtctgggcccaggcaggatgccccattttctccacttcagggagcacctgggatttgtggtgggagatggagctgcccccgtgaggactctggcttgaaagtgacaaaatccaacatgagccagcttgggcagaaagggggaatttgctagaatcaaccaaaaacttcagctgcacacttggccgctccgcatgtgggaaaggctgagctgcagagaccctgcatcaggtagggttccgggatggcatggcagccccactagggccacgtggttggaatagggggagaagctgcccccaggaagaaagggtgttccctgaagagggcatgcggcagatcaagaggcaaatgtgcgcctcaccaaggaacttggcttagcgttgccaaattttctctgtgttggattagggtcaaactcttgtttgacttggcacagaagcttggaggcccgctggctgcatgactgcctcactcagagatgagtatggagggtctagagggggcgctgtggggctctggccagaaacagccgaaagtagaaaaccatccaaatatccaaaaattgatgaatgaatcaacacaatgtagaacctacaaacaacaggctgggcgcagtggctcatgcctgtaatcccagcactttgggaggccgaggtgggtggatcacttgaggtcaggagtttgagaccagcctggccaacatggtgaaaccctgtctctactgaaaatacaaaaattagccaggcgtggtggtgcacaattgtaatcctagctactcgggaggctgaggcaggagaatcacttgaactcgggaggcggaggctgcagtgagccgagatcgaaccactgcactccagcctgagtgacagggtgagactccatctcaaaaaaaaaaaaaaaagaaccaacaaacaacagaatattattcacccatgtaaagcagtgaagtactgacacccaccacagtatagatgaaccctgcaaacctcatgctaaatgaaagaagccagacacaaaaaggccaatattgtatgactccatttatgtgaaatgtttagataggcaaatccacagagacaggaagcagatttgcggttgccaggggctgtggggagggggaatgggagtgatggctaatggatttcctttggggatgatgaaaaagttctggaactaggtagtggtgatggttgcacaacaatgtgaatgtcctcgatgccactgaattgcatacctacaatggttaaaatggtaaaatttatattatgtgtgtttcatcacaataataagaaaaaagatgagcttccttcagacaaacacatgggagcttgcagcttggagactcgggagaagatgtgtgtgagacggttacccgcacaatgggtgggttccatagcttgggtcaagagttcaagaccagcctgtgcaacatggcaaaaccccgtccgtctctacaaaaattagccaggtatggtagtgcaaacctgtagtcccagctacttgggagcctgagatgggaggatggcttgagcctgggagccagaggttgcaccactgcacttcagcctgggtgatagaatcagaccttgactcactgactcaaaaaaaaaaaagaaagaaaaagagaaaagaaaagaagaagaagaagaagaggaggaggaggaggaggaggcaacgaatcacagagggagaaactggagtgaggtggtcagggtgctgggagccaatagaagctggaagagccaggggcggattctctctgtgagccttggcccagtgaaaatggatttcggactctggcctccagaactgtgagaaagtaaatttctgttgtttgaagccactgagtttctggcaatttgttacagcagccaccggaaactaatatagttatcatgaaaccatcattagtataaaattctgtcttattaaaaatgtaaaattagggcaggcacagtggctcatgcctgtaatcccagcactttgggagaccgaggtgggcagattacttgaggtcagaggtttgagaccagcctgcccgacatggtgaaaccccgtctctactaaaaatacaaaaattagccaggcttgatggcaagcaccataatcccagctatttgggaggctgaggcaggaaaatcacctgagcctaggaggcggagcctgcagtgagctatgatcacaccactgcactctagcctgggtgacagagcaagaccttgtctcaaaaaaaaaaaaaaaaaaaaaaaaagaaagaaagaaaatgtaaaataaatgtaattttgctgcaaaccttctggcattttgcatcactcaaaactatattatcatacttcttttaggcagagaaaatatttcattgtttgtgtgtatatgcatcaaaagcactaataactaagacatttaaaatatgccataattttagaaactctgttttgaaatgtcttgactttaaaaaatatactgggaccctcagaaaaggggagtgggctgggccttttttggcttctgagaggtcctggctggtccatgccatgcgcccatgggaagacttctccacgctggcgcactgatgaccatcactaggtgtcctgtgcaccaagtgagacggtcccacaggggctggccgggccttccccagccacatctgcaccactatcccagcgacaacctcaacaaagattcctgggttctttctgagccgcataagtcaccaactctgtcttcttccctttcttgctcccttgcccaacacatgcgcctgaatctcaagctccagagagtctgctggttgcctgggcacggccagggatctgggaagatactgagggaatctctagcacactaaagcatgagaacttctgccttaggtactgggggagagagagagagagggagagagagagagagagaaagagacctcaactttgtggactccagctcacaccaagagaggctaatctgggtgaacggtagcccttgtggaatggggccaggagagatccttcctgctgctgtcttggagttgggtgaacttggcaacgttctttcagttcactggatcccctgttcctagccaggtgacattgataggttctctgagggaccaaaatcctgcttgtagggttgaggtcagtactgttggggctgtgcacttgtagactcgtgcctttccaggagataaaggcatctggagccagagctacagtctggattgtgggggaacaggaaagagttctcagagaaacaaggccgagtgtcaggctctggtggaataaggctattgatagtagaataaataggaatttagaaaccaggaagggaggtcaaggctggtagttcagaacggaggctgtgaaagtaccatgcaatctggaggcctgtttatatgcagagcttgctgtgtggcgcaggagcagctttagggctctgaaaaggaagttttaatatggtttgaatgatggtatcccctccaaaattcatgttgaaacataatccccaatgcaacagtattaagaggtgtggcctttgggaggtgattaagtcttgagggcctattattcttattaaagggctcaaggttgaagagagctcctcttgcccttccacccctttcaccttgtgaggacacaatgttcgcttcctctggaggttgcagcaacacgtgccctcttggaggcagacagtagctgtccccagacaccaatcttgcaggcacgtggagatggacttcccagcctccagaactgggagaaatacatttctttaaaaagattaaaaaaaaaatttttatagagatgggctcttgctatgttgtccagttggtttcaaactcctgactcaagcaatcctcctgcctcagcctcccaaagcactggggttccaggtgtgagccactgtacttggtggagaaatacatttccgttgttcataaattacccagtttgtggtattttgatatagcagcagaagcagactaagatagatttagactttcctctcagcttcccaatcctccagcctagatggggtgagatgaaggaatctccatttctaaccagcaccccaagtatgtgcctaacacatgtgtatgtatgtgtgtgcatgcctacatatttgtgtttaagtgtatgtatatgtgtatgtacttgtgtacatgtgtgtatttgcttttgtgtatgtgtgtacatgtatttgcatgtttgtatgtgtgtttgtatatgtctacctgcatttgtgtgtttgtatccatgtgtacatatacgtgtgtgtgtgagtgtgtgtgcatgcatttgtgtatatatatgtgtatttgtatgtctgtgtgtgtgtgtgtttttcttttcccattttttttttttgagatggagttttgcattgcactccaggctggagtgcaattgtgcgatctctactcactgcaacctccgtctcctgggttcaggtgattctcctgactcagcctcccgagtagctgggataactggcatgtgccaccatgcctagctaatttttttttggtattttttagtagagatggggtttcttcatgttggtcaggctggtctcgaactcccgatcttaggtgaccttcccgcctcagcctcccaaagtgctgggattacaggcatgagccattgcacccggctgtgtgtatgttttcctaggcagacttgagaggacttggtgactggctggaaggtgaagagagggaaagaaggtggtcagagataactgatgagtctgcctaagggacttgggggacttcacaagattccaggagcatggctgacccaatgcacactgtatagttgcatgattgcaagtaactgggaaggcagtttgggtcttaattgcaaacacttgcccagaaaagaccagcacggccgcagcacaaggagcctgagtaaagtgccccatccaggctggcctttgggatcctcttgtccttggttctcctggctctgtgttgtccacagaccctcctgtctgttttcagtggcccgcactgggcaagcacagcacacacacttcctagccacctggcattgatctcctacagccccagcctcatcacttgattagcctcatccactgtgctctgacgttctgggggctcttcctaccccatctgcaggaggctgagcatggtaaaatattttctctcccctgctgtggcttccagccactggacacttctctgggctttgtctctgcaccactcccagccataggaggggctgtgtagaccaccctgacttatggcaggaagagaacaactttccagttgagtgacaatcaaaaagatctcctccttgtgcagggatccatcaactccaagtgaatccccttccccctcacccacccagcacaacccaagcttaaccatttcatacccagtgtatagacctggtgacactgttctgtggggcttcatggtgacttccttcctgatggagtggaacaggagaggggcaactctgatgctaaaacaagcgtggggtggagagaggcttggaacagtgatgaggaactagagcttctgcaaggatgtgcagagttgacagagggacctgagggccacagacggggagtgacagagcaaagggcagcataaagcacccgcagaaagatgaatcagtgatgtgcttgcatatatgaaacattgcaaatttgaaacccttcctggagtaagggcaggcccaaggttggtaaatgtagcagctctgtgacaccaccgaaaactcatttggttccttgtccccttcgcctcgtgcctgtcctcttgggctgctcacctggactcaaggacggtttctttttttttttttttttttttttttgagacagggtcttgctctgttgcacaggctggagtgcagtggtgcgatcttggctcactgtgcctccatctctcaatctcctgggctcaagcaatcttcctacctcagcctcccaagtagctgggactacaacacataccaccatgcttagctgatgtttgatgttttttatttttttgtagagacagggtctcattatgtcgctgaggttggtctcaaactcctgagctcaagcgatccttctgccttgggattacagtgctgggattccaggcgtgagctgccgctcctggcctcagagagagttcctatagttccaggcatcagaccctcagactcagaggcaaagtgacacaactgccttattttttgtctccttttaaaaatgaagaacaagacggccacagtggctcatgccagtaaacccagtgctttgggaggccaagacaggaggatctcttgagcccagaagtttgagaccagcctgggcaacacagtccacaaaaaatcgaaatgttatctgggtgtagtggtgcgtgcctatagtcctagctactcaggagctgagatgggaggatcacttgaacccaagaggagggaggagtggggagtgacagcttaatgggtgcagggtttcctggagggtgatggatatgtttggagccaggcagaggcagtggttgtacaacactgtgactgtacgaaataccattgaattcttcacttcatttattcatttatttagacagaatcttgctctgttgcccaggcttgagtgcagtgtcatgatctcggctcactgcaacctctgcctcctgggttcaagcaattgtcctgcctcagcctccctagtagctgggactacaggtgcatgccaccacacctggctaatttttgtatttttagtagagacggggttttgctatgtaggccaggctggtctcgatctcctgaccccaggtgatccgcccaccttggcctcccaaagtgctgggattacaggtgtgagccactctgcccggccacgaattgttcactttaaaatggctgattttacgttgtgtgaatttcacctcaactaaaacaattaattcattttttcttctccaacaaaaatgtgtggcattgtggcctgtgctttgcgtgctgttagctgtcacaggacatgctgatgaggaaggtgcatgcgatgctggcccctgcagggcgtatgttccagtgggaaacagacaagaacaagcaatggagcagtaggtcttggcacagatgaggtggcgaatacatatttattaaataaaatagagacagatatgggagctcataggtggtcaacaacccagtccgaaggtcgcagaagatttcctggagaaagtggtatctgaaccaagacccagcagaggttagaagtcagtggcaggaaaaacccccaggggtgggtgagagtttggcggattccaggaactgaaggatgcccagtatggcgtggaactgtgtccaacagggcgaggggtgtgacacggagctggagaagtaggcaggaaccagatcaagaggacttttgaatgatgctaactaacggctgttagtgtaggcatcccttctgctgacggtatgctcactctcattccttttctagttccagccaggtagtagaagaattaggaagggatgagtcttgagtatttattatcttcatgtgagtaaaattcattatagatgggtgaatgagtggatggatagatgatagatagataggtaggtagatgatagatacatagatacatagatagatgcatagatatatagattagataaatacatagattagatagatgatagattagatagatagatgacagataataggtagataatagatgataggtgatagattagatagatagatgatggatagacagatgatagattagatagatagataatagatagatgatagattagatagatgaagtatagatgacagattagatagatagatgatagataagagacagatgatagatagattagatagatgatggatagatagatgatagattagaatagatagatagatagatagatagatagatagatagatagatagaataactgctgcagccatgttgtgaccatgaggagagagacaaggcaacatggccaggaggaggtggcagctcccacagagaggcctggtcacatccatcatcttggagcagatccctgggaggaggaggagaaggaagatgaagctaagaggccctggggttggtcctcaggggaagactatgactcctggtgacagagatgctggagccagagggcagagggatgagtaggggagccaatcccagacagggcaatggcataataaactaattcgtaacaagcaagacagagagaagacaggcaacagatattttagaggcaccaccagtaggatctggtggcctcttggatagggaggaggaagaaaggaggattcatagattttcctgcaataaggaatttgctgctgagtgcagtggttcatgcctgtaatcccagcaccttgggaggccaaggcgggtgactcgcttgggccccagagtttgaaaccagcatggacgacctggcaaaaccccatctctacaaaaaaatagaaaaattagctgggtgtggtggtacgtgcctgtagtcccagctatttgggaggctgaggtgggaggattacctgagtcctagtgagtcgaggctgcagtgagcttgcctacactagatacttcagataagtggaatcttgcagtctttgtcctttgtgtctgacttctttcacttagcataatattttcaaggttcacctatgttggctggatgtagtgactcatgcctgcactttgagaggctgagagggaggatcacttgaggccgggagttcaagaccagtctgggcaacattgcaagaccacatctctacaaaaaagaaaagaaaattaaaaaggtttcatccctgttgtagtatatatcagaacttcattcctttttaaggctaaataatattccattgtctggatataccacatttgtttattcattcatccgttgatggacgcttgagttgtttctccctattggctcattgttgaaagaagcttggtacaggttgccccaagtttgacaacaaatcctaaacaaccctaaacattttcacggcattagtaatatgaattgcaaaggtgaaaaaaagtattaaattctcataataaaaagaaaaatagaattgattatttttctttttttctataaaaattcatattacaaaatcattataatatgaaaaggcaatcaaagagtaggtagtcaaaatgtaggaaggaaaggattatagtcaggcacttaattataagaatattatgttaattttctagatttgctgaggtgggtgttatcagtttttaaaaatgtgtaatttgtgatttttttcatattctaaaaacttgaacgcacacttttacttgtaagtttatattatttttcataaggagagcctgcccatctcccaatactgtataagcttttggcactgcacctggatcccctctgccaacccggggtccacaactctgccctcctctatccacttcctagcagcgttaaccaaagcatggccacttcctccttctctaagtgctttgtctccttgccttctgtgattccaccatctcctggctttcctcctattcaccggctgctggatttcctcttctttgcttgtttcctccttctctagacctctaaatgtagcagtatcctgggccttgggacaggtccttttcttcacccacctggtgacagtgccaaggccatggctgtaaatatctttcttttgttttgaggcagggtcttgctctgtcacccaggctggagtgcagtggcgtggtcacagctcaacctcttgggttcaagtgattctcccaccttagcctcccaagtagcaggtgcacaccaccaggcctggctaatatttaaatatttttgtagagacggagtctcacctgaggctgcagtgagcagcctatctcaaaaataaataaataaaaaattagtatctttttttttttttgagatggagtttcactcttgttgcccaggctagagtgcaatggtgcaatctcagctcactgcaaactctgcctcctggcttcaagcaattcttctgcctcagcctccgagtagctgggattacaggtgctcatcaccacacctggctaattttgtatatttagtagagataggccatgttggccaggctggtcttcaacttctgacctctggtgatctgccctcctcagcctcccaaactgctgggattataggcatgagccactgtgctcagtcaaaaattcacatcttgaatttagctttgtccaaatagaatcttcactcctcccctttccacacctgttcctccccgcttcttccttgtctctggagcagcacggaatgggtgttcaacgtggtttgttgatggtcaatggctgggagggacagtggtacttcctgtttctgagggctatggccgctgacctggtttggggaactgactgcccctgggctaaacttctatacagttgcctttgggtggccattggtgcccaagccctgggcgtcctcttagagccaggggaccatctaagcctgagcaatcatatctgttcttttaattgcagtcaaatgcatgtaatgtaaaatttacctgaagtggtaattttaagttgtacagttcagtggcatttagtccattcacaacattgtgtggccatcaccatgatttagttctagaatatcttcaccatcccaaaaggaaacttgtgacctatcagcaggcctccctacccaattccctgcttccctcagcctggcaacgattaacctgctttctgtctctacctatttgcctgttctggacatttcacataaatggaatcaatatgtgggcttctgtgtctggcttctttcacgtggcataatgtcttcaaggctcatcacgttgtagtgtgtatcagaacttccttcttttataaggctgagtaatattccattgtgtggatggaccacatttctatatttgttcttgaaggaagtggaagggagtggaggctccatggcagggcaggtatatgccgggggctggaaaaattcaaccaggagcacaacgatgccagctccttggggtgtggctgggggtgctgcagcccctgaatcatctgtcaaccccatctgtggtttcccacaccgtggtgaaggcttgaggtgagtgctgtagggctgacagccacggggtcattacgggtgagattatccagcgtccgagctttctgccctacagccccacattctttatgcctcaggcagcttcttcaaacctccccgcggagacaggaggtcccctcctcggtcaggggagggtgagggctccgtgccccacggtgccgcggtcagcaacacgggttgagcccacgcggggctccccccagcagggggcgctgagacaagtcgggttccaggggcctttctcctaccagggctgcttgtgaatttctcctacttgggctgcttgtgaatttccaccttgctgcggtgtcttcttcctcggtttacttcacacatatttgagtgaggattacttgcccttggggagtctggacggctccccaattttgggatgcagctagtgctgtactggccgcctcataaccacccagggagcgtgtgaaaaggcaaattcctggacatgatcccagtgggaccaggacagagtccatgaggcctccaggtgattctcatgcccaggcttgggactccacacggccctccttcaagttcacgatctgcagacatcaggcttctgccttctacgctgcaccgtcttgcttgcgggctcatctctccttttaatcaatccattcaggtgaaccaaccacagagaaatggcttattctatgtttacacctgaaaaatattcattcattcattagttcaatagaactttatagaacgccctatgccaggcaccagatataccttggtgaataagacacggttcctgccttgaggtctggctggggaggcgtgtcaatacattccaatgtgatgaatgctaggaaaagcaaaacgctacgatcagctcagggtgggatcacagaagtggatgcctggcttacctggctcgaatttggggaatcaccaggaagaggtgatttctcagtggagactagcaggatgagcaggaaaattccccggggacaggaagtcagaaagcagagagcagtgacaattctggtggggggcggagggaagcagagaactgaaccaaaacatcataatttgggcataggcattttagcattctagattttctttaaaattcatgattcaagagataaaaatataagtttgtttctagatatatgactaaggtctcaaagagaactacttccctaattagtccactatggaaagatgtattcagattatttacggataggggaaggccctgcataacttctgtgtcagtctccggaatggctcatatgcaaatggagaaggaatcactggatctgggtggatgccttctggggaacagagttgtctttcggtgttccaggagctgcagatacaactttgaaggcagtggctcgaaaccctggctgcaagtaaaaatcacctgggagtttttttttaattttttatttttatttttattattttttttgagacggagtcttgttctgtcgcccaggctggagtacagtggcatgatctcggctcactgtaacctctgcctcttgggttcaagcgattctcctgcctcagcctcccgagtagctgggattacagtcatgtgccaccacacctggctaatttttgttatttttagtggagatggcatttcaccatgttggccaggctggtctcgaactcctgacctcaagtgatccacccaccttggcctcccaaagtgctgggattacaggcatgagtcactacacgcctggccacctaggagcttcttaaatctaccacacatggcaaccactctggcaactgatatattaactgtttggggctagggtgcaatgtctgggtggaaggggaagcttctgtaaaggagatgaagaagaagctaccagggaagtgggtagaaagccaggagaaaaaaggtcacaacacagatgtagggggagagtggtcaggaaggaggatgtggtcaacaggtcacaagctgcagaaaggcaagaaaacgaggactggttgtgtcatttagggccatggtagtcactagcagcaggtgactttagcagcaggtgactttagcagcaggcttgtcagcaaagtaacgtgtgggaggctggatcacagagttcaggagaatgagttcagggacttgggaggtgagaaaatggagccaggatgcggactgacttggaaggtagaaagaggcagggctgttcatggagggggaatacggggtggaaggaatgatgtaatgatctgttgaggataagagagacatgaatgtgtataaaggtggcaggtatttgggagacagaaggcgtaattgatggtataaagttcctaaggaggtggaaagaaagggaagtgttgggatccaacacattgttggcagcattgaccttaaataggagggacacctcctcagttgtaacagggtggaaggtggagagggtgtggtgggggcagggtggctcattttacttggtgggggtcaagaacatccatcactcagaatttactcatgaatgcggtgactggattttcagaggcacgtggccttgatagaggcctctctctacgtcctctctttctttcacgtctccctcgtggcagccagacctggaggcactgtcccagtgatgagttagctgggggagtgtaggggctggccaccctttctttctggcccatcttctccacctgtggcaggacccttggggaaggaagctggaaggttgaagcctggcctaagcctaagccccagggttcatcagggtctactatactaagggtctctgcattgggggcagggctcaggcaccaagatgactccctccctgagaaaccccagagggaaggggatactcgggcattgagccctcactccagcaccctaacaccttctaccctcagtggtggggtctttgcctttctgatcctcatgtacctgaggccacagtgggcaggttgtacctgccctgtgccctgcaggcacaaaggggctggctcccttgcatgggccccctctttatcctccaattccctcctgttttccttctgctgactcagagttaggaacagagcctctccaaactttgggaagcacctctcctgccatctaccatggtgtctgactgctggacttagggagagaagcgccttccccccggctcctcactggcagaaagtcctcctggtggctcccgatgaatgagcctggcccattttctgcccatcctctgtacccagcagtgcccccaatcattccaccatgaaatgtgcagtagctttctatccctcaactatttcatgctcacttggcccaaatgcggacagtcatgggttcttctgcttttgatatggaaacgctgggaagggaagagcgtggtccctttaaatgatacggaacagcgcaagggaaatgttgggtagaggaaggttgtgctccctggcgagggctccaccctcgtggacctaggttaggacaggcactcctgcttttgcacccaaatgttgcatttcccaagaccaccctgtcctgccacacccccatcctgtgcctataaaaacccgagaccctagcagggcagagacagaagcggctggacatctagaggagtatattggcggtgggacacacaggcggctggatgtcaagaggaacgcactggcaccggcatcggcatgccagcaggccactgaccagcagaaggacgcagagtttggctggggcagttggaggagagcctgggacaccaagcggcccaactccagaggaaaaccatctcccttctggctcccccatctgctgagagctacttccactcaataaaaccttgcactcattctccaagcccacgtgtgatctgattcttctggtacaccaaggcaagaaaccctgggatacagaaaaccctctgtcctagtgacaaagtagtgggtctaattgagctgactaacccaagctgcctacagatggcaaaactgaaagagcaccctgtaacacacgctcactggagcttcagctgtaaacattcaccccttgacactgccgtggggtcagagccccacagcctgcccatctgtatgttcccctagaagtttgagcagcagggcactgaagaagcgagccatacccccatcgcacaccatctgagggggacaaaggaacctttcccgtgagactttttttttttttttttttgagacggagtctcactctgtcgcccaggctggagtgcagtggcgcgatctcggctcactgcaactcctgcctcccaagttcaagcgattctcctgcctcagcctcctgagtagctgggactacaggtgctcgccaccacacctggctaatttttgtatattagtagagacagggtttcaccatattgccaggctggtctcaaactcctgacctcatgatccgcccaccttggcctcccaaaatgctgggattacaggcgtgagccaccacgcccagcctcctgtgagactttcagtctgcttgctgcaagctagagcagtgactaatatatattttctgtggtctacctcttcacttagctacatactgttttgttgtttccctcaaatcgccactcccaagatcaacccaaaacagagttcaaagtgcaaagcaagcctttctgaaatagaaggcaaaaatcaaagcctccttcctggtggtggtgtaggcatgggtgagagattctaccctctgagtcccacttggacttgtgtggactccctcctctccagccaccctggctgtcttccagttcctccaatgctctgtgccacctcccatctcacagcctttgcatatactgtcccctctttgtccagctaactatgatttatccttcaggtctcagtattgatgtcacttcttctagaagcccttacctgaccttgcttttaatgggaaatagggcttttaccctctaatgctgttcccctagaatctgagctggccacatatttgaagtctactccagccaacattatggtctggatcataatcatggtctgtttgcttagaggctactgatggtgctttcctctaagcccacactcaagacccctgtcatgagcattgctaagggcacaggctttgagaagagccccagatgttctatcttatatcctaaagagaattctggcaggattcttgtctctgcctcctgattcgtcatgagcagtgaagctgagcagctgaaactggtttccaccacagttccctcatgtctattccatttgtatattgctctacattttattttttgtttttaaataaatttaaaagaattttatttttatttttatttattatttttttttgtagagacaagggtttcgctatgttgcccaggctggtctcaaactctgggctcaagtgatcctcctgccttgacctctcaaagtgttgggattgcaggcgtgagccactgcatccagcctgtatattgctctgtaacaaactatcccaaaagttagtgtataaaacattttatttgctcatgatcctatggatccgaagtttgggcagagttcagctgggctgttcttctgctctatgtgatgttaggttggtgcaaaagtaattgtggtttttgccattacttttaatggcaaaaatattagggatcattcattcaactaccttataggaatcattcatttaactacatagctggtagctgggctaggctggaaggtccaagaaaatgcattcacttgtctggtatcttggtgccccttcatggatccactaagtatttctgtctacgtggctagctgggacttcctcatgacatggtggtcttagggtagctggacttcttacacagtgctggcttctaaaggaaaccttcaaagaggggcaaatgtggaagtcatgatctttaaagcttgacttggaagttatacttctgttacattctgttggccaaagtcaataggaccagccaggttgaaggaaagcccatctctctactgagggagcggcaaagaatttgtggccatctttaatccaccaggatgcctcatttggcacagttgaaccagagatgagagcctcaggctgcatttggaagatcttcccataggaacactcccagggcttatccataattgcttactttaaggctcggaattctaacttgagtgcatgccttgtggtctgacctattcctaggcaaagcaatggctttcccctatcaccatctttatctcatacatcttataacccttaaaactggtgttcatgtggagagtaaatagtttggaggcatcaccaaataccagcatgggagcatgaatcgggcaactcatgaagacctcaaactcctactaagggcttccaaccaccaacattgcttccactcacagtttatgggccagaactagttacatggcttcaacctaactgcaaggaaggctgggaaatgtagggagcacatgggatggttggagtgcacaaatggcctctgccacatcttctcttcctgcctttgaatgttgtcatgtgagcacttccagtgatggcagccatcttgtgaccatgaggagaaggtcaagagaattccaggaaggctgacctgaagccctagtgttgttgagctgctgaaccagccgtggtactgcccattcttggaccccttgacatgtgagataccttgggtgggtgttccattactgtttttgcagccaaaagaaactcaatggatgtaatggtgaatgcttttaagaaaataaaacagggtggagtgtcatgtgacttggggagagggtggcaaaaatctaggcgtgagtgtgtgtgtaacaatggacaaggaagtgagggaagtctttgaatgaatagaaaacaccatcatgggaagagctctttgggcagaaaggacacattacaaagaccctgaggtggctgggtgtggtggcttacgcctgtaatcccagcactttgggaggccgaggcgggtggatcacaagatcaggagatcaagaccatcctggccaacatggtgaaaccccatctctattaaaaatacaaaaattagtcgggtatggtggtgcgcgcctgtagtcccagctactcaggaggctgaggcaggagaattgcttgaacccaggaagtggaggttgcagtgagccgagattgtgccactgcactctagcctggtgatggagtgagactccatctcaaaaaataaaataataataataataataataataataataataataataataataaagaccctgaggtaagaacacagccagcatgtttgagagagaaggccaataaggctggagcagagtggtagcagagaaggagagcatgaggaccaagaggctgaatggggtcagaaaaggcagactcttgtagataaggtcagagtttgacattttaaaagacagatttgcctgggtgcggtggctcatgcctgtcatcccagcactttgtgagaccaagataggaggatagcttgcgcccaggagttcaagaccagcctgggtaacataatgagaccatctctacaaaaaaaatttaaaaattagccaggcatggtggcatgcacctgtagtctcagctactcaggaggctgaagttgggagatctcttgagcctgggaagtcaaggctgcagtgagtcataattgtactactgcacaccagcctgggtgacaaagcaagatcctgtctcaaagaaaaaacaaacaagcaaacaagcaaataaataaaaaccagatttactgatgtacagctgacaaacaatatactgcacatgtttaaagtatactcttttgggttagttttctttcatttagtataattattttgagattcatctgtattattgcatgtatgagtagcttattcctttttattgctgagtagtattctattgtatggatacactgcaatgtgtttaaacattcacctttgaagttgtttgtagtttctggcaatgaaaaataaagctgctgtgaatattcatgttcaggccttctgtgaacacatcctttcatttctcttgtgtagacacccaggaggggaatggtagaagtgtttaacttcccaattttttaagaagcaaactgatttaccaagtaattgtaccatttacaatggtaccaaatgcactcattttcccaggaacagtgtatgagagtttcagttcttccacatctttgccaacacttagtatgaccagacttttaaattttaaccattctaattagtgtgtaataatttcttattgtgttttcaatttttatttccctgatgactaatgatgttgagcatcttttatttatttttattttttattttttttgagacagagtcttgctctgtcacccaggctggagtgcagtggcacaatcttggcttactgcagcttccgccttccgggttcaagtgattctcctgcctcagcttcccaaagtgctgggattagaggtgcgagccaccacacccggctaatttttgtgtttttagtagagatggggtttcgccatattggctggtctcgaactcctgacctcaagtgatccgcctgcctcagcctcccaaagtgctagaattacagtcatgagccacggcatccggtcaatgttaaatatcttttattataattatttaccattcatatatcttttttggtgaagtgtctgttaaaatattctgcccatttttcactgggttatttattttcttattattgagttttgagagttcttacatattctggatacaagttctttatcagatacatgttttccaaacactttctgccaatttgtggctcgtcttttctttttttttttcttttcttttttgagacggggtcttactccatcatctgagctggagtgcagtggcacaatgacagctcactgcagcctcaacttcctgtgctcaagcaatcctcccacttcagcctcccaagtagctgggactacaggcatgtgccaccatgccagggtaatgtttttattttttgtagagacaggatttggccatgttgcctaggctttcattctcttaataatatcttttgcagggcaaaagtaacatcaattttttctgtctcgatcatgttttggttattgtatctaaaaagtcattgccaccaagcgcggtggctgacacctgtaatcccagcactttgagaggctgaggtgggtggttaacttgaggccaggagtttgagaccagcctagccaacatgatgaaaccctgttgccactaaaaatataaaaattagccaggcgtggtgggggccgcctgtagtcccagctactcgggaggctgaggcaggagaattgcttgaacccgggagatgaaggctgcagtgagccgagatcgtgccactgcactccagcctgggtgacagagcaagactccatctctaaagaaagaaataaatagtcattgccaaaatgaaggtcacctagattttcttttgtgttatcttccagaaatgttatagttttgtgttttgcaattagctcttgattcatttttagttaatttttgtgaaagatgtaaaggtccattatgtctagactttttttttttttttttgcatatggatgtccacttggcccagcaccgtctgttgaaaagactgttctttctccatggattgcttttgctcctttgtcaaagacctgttgactatatttctatgagtctatttctgggctctgtattcggtttcatttatctatatgtctattctttaaccaataccatgttgcctttatttctgcagcttaatatatagtaagtcttgaagttgggtaatgtcagtcttccaactttattttccttcttcaggattgtgttagctcttctggttttttgcctttccatataaactttagaataattttgttgaagtcacaaaatagtttcctgggattttgatcagggttgcagtgaatctatagatctagttgggaagaactgacatcttgacaattttgaatctaatctgatctataaacatggaacatgtcgttcttcttttttttttttaatcttggctcactgcagcctctgcctccaaggttcaagtgattctcctgcctcagcctcccaagtagctggaattacaggtgtgagccaccacacctggttaatttttgtatttttagtagagacagggtttgccatgttggccaggttggtctccaactcctaacctcaggtgatccacccacctcatcctcccaaagtgctgggattataggcatgagccactgcacccagctggaacatgtctttccatgtttagattttctttggtttcttttaccagttgtatagtttttctcgcatagcttttatacatatttttaaaagatgtacacgttaagtatttttttacgttaatgtaaatggtttctgtttaatttcaaattccaattgttcattgctgatataaaggaaagcaactgacatttgtatattaactgtgtatcctgacaccttggctttttagatgatgacaataggagcccccaaacccttggccttgggttgttcctgactttcccaagtgatcttcgacttttggaatctgcatgcaaaggaaagaaggagtttcccatacttctccttggaatggcctggcccaagcacagcctccttggccaaggcccctgcctccatgggaccctggcctttggaaagtagaggtgagagaggaggccgcaggtttaggagacagggtgggggtgggagccgcaggtcttgccggctctgcacggatggccctaggaaagtcacaccaggtggatggagtgcctcacatatagaaagggcaactacggttttgtgtaacttttgtttcagttatttacatgaatatgtgtactgaatcataataaaaaatgtatttctggccaggtgcagtggctcacacctgtaatctcagcactttgggaggctgaggcaggcgatctcttgagcccaggcatttgagaccagcctgggcaacatggcaaaacctgatctctaccaaaaatacaaaagattagctgctcatggtggtgtgcacctgtggtcccagctactcgggaggcggaggtgggagaatcgcttgagtccaggaggtggaggttgcagtgaatagagatcgcgccagcctgggtgacagagcgagaccccatctcaaaaaagaaaaaaagtattcctcactatgtgttgcagtcaaaacatttgaaagcccctgtcacagaggggttttcttccctaaggattacagattagaggtgggctccgttcagctcagcggggggctcagtacctgcctcccaaaagtttgtcccatgccaccagcacctctggccctgtggggtgaatcaaagctctcagcagctgagctcagttctcaactgttctgaccacccacattctacggagtgtctttactttgagatcatcttgactctcggtttctgttaaagagtaaaacaacaacaaccatagctttttttttttagatttttaaagcactgagtctgtcaactcagtgcttaaaaaagcacagttctcagaaaagagaacacactctggagaggcaattcattgagtatttttagcaggaacctaaaaggggcagctcagggtagttgtggcatttaattatgaccaggagaggccattggagaattttaggcaggtgtgttcatttcctggggctgctaaacaaatgaccaggaacttggtggcttaaaacagcacacatttattatctgacagttctggaggctggaggtatgaaaccacagtgttggcagggccacgctccctccagaggctttaggggagagtccttttcctcttccagtttctgggggctcaggtgttcctgggcttgtgggtgcatcgctctaatctctgcttctatctgcacaagactttcccgtcttctgtgtctcgattctgtctctgccttttataaggatacccgtcattggatttagggccctcctcggtaatccagcatgatctcatctcaagatccttaatttcatctgcaaagacccttttcccaaatctcatctgcaaagacccttttcccaaggtcacggtcactgtctctgtgggttagaacatggatatatttggcaggggtggggggctggggggagcaccactcaacccactacattgaacatttaaactttacccgtattttacaacccagttgcggcttttgttttgttttgctttgtcatttaaagtcaggaaggcctcctgaaagaagttgtttctgaaatcggtcaggaagcagtgggctgggagaagacagagcaggccaggggtgagagagtgtttaggacagaggacaatgtctgtgtgaggtggaagggggagtactgtgaggagctcttaaaggtctgaaagcgcgatatggcagcctccagagtttgagagtgaaagggacagatggtaagaccagggaagtaaatggaggcagaaggtcacggcagtccagaacaatgctttggcctgctcttgaaggcgtggggaagctgtctttaagccacaagtcttggaatcatgatcagtcagaaagaaacctgtttctcatccctactccagctcacccccacacagccattggacattttgtttttatttttcatttttatttttgagtcagggtctcgctctgtcacctaggctggagcatgatggcgtgacctcggctcaccatgaccttctcctcccgggttcaagtgattctcatgcctcagcctcccaagtagctgggattacaggcacgcgccaccacgcccagctaatttttgtaattttagtagggacggggttttaccatgttggccaggctggtctcgaactcctgacctctggtgacctgcccgccttggcctcccaaagtgctgggattataggtgtgagccactgcacccagccttcattggatattttgtattgttggaatgagtgtgaggggtgcaattagctttagagatgttgtccttctttgctcagcagcaggcagggaagcagagaggcccaagagtctcacaccttctcatttccctgtcattcaaagggagaaagaaggaaggcaggagctccagagtgtgaagagtagagtagctgtggaaacttttagggtgggggagacccgagggggatagaggccatgcctctgtttgtggtattcctacaggcctgggaagagtggaaacccgccctcgctgtgtcccagcagagcagggtggtggagctggccccagccccgcagccccacagccttgtggcttctgcactctggtgtttgtcttggctgagagctccacagggctttttgaagctgattccatcaaggcaaagctggaggagtcaggacatgggatcacagaagaggcagctggaaggggcctcagatggggaaatagagggggtcccacagtgagatgatggcaaagcaggaagagagcccagggctcctgactccttgcacagtgctcaaaccaagaccatgtagcttcccgagtgggtgaggagcccgagacaggctccaaatcttctaggaagacatttgaatgccaaaggagcccagaattgtgctgtcccagaggtgcctcctcttctgggttcctgacacagagactccaggactccagattccaggggctcactgcacctgtagacccccccgggccaggcaagggtctccaaggaggcctagctggcccgggacactgggccatgccccacccctgacaaccccataattctcagatgtggattcaggactgcccttgctttacctctctgctcagtgaggaccctcccgtgtcctgttccacacagatgcagatggatcacgtgtctcacagctgaaggcctcccccatccgtctccaccatctgctgaggccccataattattccaaggcccggtgcagcctcactcagaggggagagttcacgcggtcctgtaatgcaacccaggcccgaggccgcgcgggcagggggtcccagctgggtaatgagccgctggctttattgaattctccggcttgagtctgactaatcactgcctttagccaaggcaacctgggctgccatctgagcaccctggctaggacttcctttccttctcagcaccccaattcctgcccctcctccccaaacatgtttaaatgaccaagatcagagcgggaggggctcctggggggctggtttccccccatccatttgggagaaaatgtggctggctcagatctggggcccaagcagggtagaccagaatgggccgctggggtgtactttgctggggccaccctgtgccgcgcctgcaagacctgcagctcccacccccaccccatctcctaaacctgctgacgtccctatcacctcccctttccggaggcctgggccccgcggagggagggccttggccgaggagactgtggtgtgggccaggcctttccaaggagaggtgtaggaaatgccttccctcctttgagattctgcccaggcttgggccccacccaatgtcatggtcgtgcgagagccagccccaggtctctccctcctctctgttccccagccctgagaggactccccaccagcattcaccattcttatctctgcatgctggctttctagactagacggtaccctccctgtggacaaagattgttgttattttcttttttttttttttttgagatggagtctcgctttgccactcaggctggagtacagtggcgtgatcttggctcactgcagcctccgcttcctgggttcaagcaattcttctgtctcagtctcccaagtagcagggactacgggctcacgccaccatgtgcagctatttttttttatttttatttttagtagagatggggtttcaccatgctggccaagctgatctcaaactcctgacctcaggtgatctgctcaccttggcctcccaaagagttaggattacaggcatgagccaccatgcctggccagttattggttccgatgtgcccagaacttggcacaccgtaggtgctctaaaaaacctttgtggagagaaatagagggagcaggtgcagtgtgaggtaggagtgtgggtgtggggtgtgcataagccacgtggcacccaagatactcttgtggcacctctgtacctccccatcgcggctgctgggggctggctgacttgggaaatggtatcagctgtgctgtcccgtcaagaccctagcggctcaggagttgttaatgtcagggtgaacctgaggtcaagggtcactgagagtgacctggtgacctcctcccacggctcctagagcagatttgaacccaccctggcagtgtgaagaatccatggttctccaccctgtgacaatggtgggggatggaggggcccttccaagatggggccaagcccagccctctctgacctctcattctgagtagcaggagagctgtgcctggtgtccttggggaaaggggaaaaggcagatcacgcccgaggccaggcctctgctcaggagacccagcccagcctctgctcccagtggcctgagtggaggaggcccggtggacagtgggcatgtgccactgagccgctcccgctgggcccaccttcagtaccgtgggtttggtgagggtagggcccacaccacccacagggaagagtgtgagggacacagagtcagacacacagacacaccaagaggagagagagaaggaggcagatccagagccagttccaagggcctctgggagggaggagaagacttcaaagcgctcccaaacagcttataaacaagccagtgggcggggcagccagcatgggctgggggtcgctttctggaggggctggaagcttgcacggggtgtgtggaggccataggcccggggtgggcaggaggagggcccagcctaacctctctgtgactcggtttcctctcccgcgctagggagctccctcctggggctgccgtggggtcagcagcaacgtgcaggtgaaaacactgtgtgggctccaggccgatcagatgttatttattattctgagctgtgttttggtgggagacttggaagggctggagggagagtcagagtgctttgggctcctctctttcccgatgctgctttgagagttctcagagtagaacgtccaggaatggggcccgggaaggagaagtccgtggcttgagacaggaccaggttgggtgtgggggctttctccatcagccccaggagtgggggtaggatggccaagcttcccctgccctgccgtgtgcccctctcctgccctcctcagcaccccccaacctctgctcggtgcctcccctcctccgaccccctctcatctctcccacaccctctaatggtctcttgggactgcccagaaatcggcctcctctccttggatacttgtcctggcctaatggggctgtgacagtttttctaagtcctgcttataaatgtgtcactgtccatgtccctttgtgctatcaaaggaggctgcgcaaaccgcgtttgtccaagggctgtgtgaaggcccccgcgcggagcagctggaacacgggctgatgaaattacggggaattcaaagcagccggcgtcgcccgctgtctggcttcattacggggactggcctcgaagggaagtttattccaataatttagaggattaggatctgacacccttcattagcgatttgacataagcagaaaagacagatcctgcagaatggccgcacaacgggaagggaccagctcaggcggggagaaggcagcacccgcccggctgggaaggggaagggtctgggtgtggaagcgagggtcccgtggccgttttacagtcctgtgagatggcgagctgtgttcttgaaggggaaagtggacgtggggaaggagcggcctgggctcaggcctcagtttccttagctgtaaagcgagattaccttcaggatcccttccgtatctgatgcgtgtgggggccactccacctactgtccccgggacacagcagctcctcaaggcccttgtggtttggccttggaaaggtacctctctttcggggctctatgtgcctccgccccctacccccaggatcgagtgaccaactcgaaaacactcagactgcaggctgctctgtggcattttagatagaagccatttgctgccaaatgggggaggaatcgcccccagcccctggcagcttctggctctcttcccggcccctccacaaatatagcccctgatgtttcaaaaatttcttgtccagtctgtgaaaaccagagtttgggctgtgccttgacagcagttctggcagatggatgggggaggggtgattttaaaaggcccctgcccacacccagcaagctggtgtccctgtttcctgtaccgtggtggggtagctgtgcgacatgggcaggttgcttagcctctctgtgcgtcctttcctccgatctgaaatggaggtgcagtttgttgtgaggattaaatgagatgatgcgttcagagaagccacacgtgtgaagagcccagtgcatctggcagctggtaccaccaggactgctcactctgtgcgaccttggacaagtcgctcgccctcttcgaccacagaccttctcctttgggaagtgggggaggccagacaaggctggcagtcagaaggagctcactgaagagcagccactgtggtcgtcagcgagggcagctggactccggcacaatcctgagacactgtgaccgcggaggttttctcggtgtgtcgatggaagagggaggaatgtgatccgtcccagccgccggcggggccagagcatatctggtatgtgtctctggaatgatttggggaaaattaactgaagttggaacttaagacgcaaactgccctggacacagagatacagagctgtccgtgcgcacaccccccacaaagggccggggccggggtgggagtcggcttacagggcacagcgcggcgcaggcccgccctggaatggccgtgaacttgttgtttttccacgtcatttgctctcaaatgtactatcaagccgggcgatgctaacccggtggctgcaggtccctcctcgtaacaagcgattgtgtgttctttagaggtggccaaaggggaggagggggcccggccccaaggaggtgggggaaagggaaacaagccctccttcagagtgagcttgcgtgtcctggagccagctccccgcaaagcacatgccatttctggcccttgaaggggttaaaggcctcctggagtcaaaaacaagcaggtgtcccaccgtgccagatacgctgcctaaactgcttccagcttctttttttttttttccccccttctgcaataagtctgtgatcagccacgggacagaggcgccagcagcctgcctgtgacaggcatcaggttagctggctcccactcgggtggcgcgcccaggatataaatccgggcgcgggcccctgctgtggctcctctccctgcacactcaggagagggagcttccttctaaagacctttcttttatctgaagccgcacagcccggcaggctgtgctgacttggtggaggcagcagcggcagagcagcctgagcagcagcctgagcaggaaacctgctggggtggggagggcaggtgtctgcagcccctgagaagaaggccctggtgggccccagaccctggcatcgtttcaggggaggtctctagccgccccagcctgcaccatgtgggccccaaggtgtcgccggttctggtctcgctgggagcaggtggcagcgctgctgctgctgctgctactgctcggggtgcccccgcgaagcctggcgctgccgcccatccgctattcccacgccggcatctgccccaacgacatgaatcccaacctctgggtggacgcacagagcacctgcaggcgggagtgtgagacggaccaggtgagtggggtccagagaccagagatggaccacgtgagcctgtgagtgacgggggtgggagccgtcggggagggactgtgtgggagtgtgaggaggacaacgtgagtggggtccagaagccacagtgtgaggcggaccaggtgagtggtgtccggaagcaggagtgtgagatggaccaggtgagtgggatccagaagccacagtgtgaggcagaccaggtgaatggggtccagaagccgcaatgtgagatggaccaggtgagtggtatctagaagtgggagtgtgaggttgaccaggtgagtggggtccagaagccggtgtgtgaggcggaccaggtgagtggggtccagaagccacagtgtgagatggaccaggtgagtgggatccagaagctggagtgtgaggcggaccaggtgagtgggatctagaagtgggagtatgaggtggaccaggtgagtggggtccagaagccacagtgtgagatggaccaggtgagtgggatccagaagctggagtgtgaggcggaccaggtgagtgggatctagaagtgggagtatgaggtggaccaggtgagtggggtccagaagccacagtgtgagatggaccaggtgagtgggatccagaagctggagtgtgaggcggaccaggtgagtggggtccagaagccagagatggaccatatgagcctgtgagtgatgggggtgggagccacagggtggggaccatgcaggagtgccctgcaggtcctaggaaggtgaaggaacacaggccccgttcacctggagagaaacagggcaccatcctgtctattaacaccgaagcctggaaggagaggtgggagcgatgtcccagttcatcagggactggagcccgaggattcctccttcatgcgtgctgagggctactgtggccagcaccgtgccgggcacgtcgtgtatgttggcatgacatgtcagcatggtgggcatcagcagcccattcacaggtgagagagtggacacagagccaggcacggagggcacagttgtcatggccagtgagggaacgatgagcttggaactcatgtctaacaagaaagctttgattgcattggactccaggccacctcctcaggagtttggaccctgagcctgagagaagaccaggctgacggcaggccaagcaggagcagctctgaatggatctctggtgtccctgggaggaaggagaccacgtttcagcctcccagcgtccttggtcctgccttctgctctgtatcagagggcactgctgcagggcagggccagttctcttctagctcccgagtcattcccgagggccattcctgcccaccccctctggggcaacaggctgtgggacctacacctgctccaggcagagctatttcctgcccagtctggccagctctgagggcagcacggagtctcccaaggctccagatccaggctggggcatccccagggaacacgagagacactggttcccccatagatgcctggttacccacaggagagcagagggctgacctggagagggtggcctcaacctcacagtgcccagggacaattcttaggcctcccaggacagatgctccccttgggcaatggtggtgccaagtgaaaggaagataagaagtcaggaggagtggtggctgctcccatctggccaaggtcatgccattagttggctacatttgcaggcacaggctggcctgattaaccaggtagggcttggggatggtgagactctggtggattttgtgtgtcttggagagaaggcacctgtggaaggctgggtatccagacagcccttggggacattctggcccccttacacagaagtgttctaaggaccccctgtaggttccctgtggccagaagtaccttccctctggtgcccaaggacccaggctttcatggacctccaggtcctgaatgtcttagggaatgggatgaggctcaggccaaggagaaggttctcctgctcctactccctctcctgctctccattccctgcggggtctctctcccttagacccagctctgagagctgcccatccctgtcccaaagcctcccctggtgtggcctagaagactatgccaaacaagggctgcaaaacaaagtccccattctgagccgaaacgggtagaacagtaaacaagtcaagcaggcaggctccatgcagccagggtggggggatattttccccctcttagctgatgtggaatgtcaaagaggctgaaataaaagttggaatgacaagaggccagccctagtggggagtaattcacagagttactacctggtggaggattaggagcgttgcctgcctgccaagtgggtacgatgtgttattgtcgaaaacaccacgtgaaatccttgtttgtgtcagctccaggagcatgttgctaatttcgaggaattaaactaatgctttacgtggctccacagaatatcagaggggattacagcctggcaagtcctcgctgacggccttgctgacctttgccacacaaggggactttttttcttgttgcttttcccgtgaaaggtcccacacggagctgatacctgggcctggcacagcctgtggctctgagacctggcgtgtggggcccgtcacgcctgccctgactgttggctgtggatcgatctgggccctctcacagcctctgttccccgtgtgtgtcggtctccttgaggggaggagaggtgtggatcatctcggataaagtcccaggggcattcccctcttaacctctgatgcgatctcttccagtcagcaaggcatcctcactcccataggaaagagatgaaaggcaggcctacttgttcaagctagacctcatttgtgctatatgatgcaggagaaaaaactccatttctcaatcccttccactgggagcttggagccttgttctgccacttcccgtctctgtgaacttgggcatcacctctctgagtctctgcagtctcatctgtaaaatggttgtaggaaaacttttcctcttagagtctttggcccaccccttcctaccctgctagctgagtgaccttgggaaagttacttagcctctctgtgcctcagtcatcatctgtggagtggagataatggctatacccacctctggcttgtgatgagcatagcaagctcacagatgtcaaagttcttacacaggggcctagcatgtaggagatgctacgtatgcattcgttattattttcaagtgttttgctcccactagatggtgagtacatgttagttctcctccccacaaaccatggggtaggatagggagcccctcctttcctccttctccctgttcaggccactctctctggctctttcaggagtgtgagacctatgagaagtgctgccccaacgtatgtgggaccaagagctgcgtggcggcccgctacatggacgtgaaagggaagaagggcccagtgggcatgcccaaggaggccacatgtgaccacttcatgtgtctgcagcagggctctgagtgtgacatctgggatggccagcccgtgtgtaagtgcaaagaccgctgtgagaaggagcccagctttacctgcgcctcggacggcctcacctactataaccgctgctacatggatgccgaggcctgctccaaaggcatcacactggccgttgtaacctgccgctatcacttcacctggcccaacaccagccccccaccacctgagaccaccatgcaccccaccacagcctccccagagacccctgagctggacatggcggcccctgcgctgctcaacaaccctgtgcaccagtcggtcaccatgggtgagacagtgagcttcctctgtgatgtggtgggccggccccggcctgagatcacctgggagaagcagttggaggatcgggagaatgtggtcatgcggcccaaccatgtgcgtggcaacgtggtggtcaccaacattgcccagctggtcatctataacgcccagctgcaggatgctgggatctacacctgcacggcccggaacgtggctggggtcctgagggctgatttcccgctgtcggtggtcaggggtcatcaggctgcagccacctcagagagcagccccaatggcacggctttcccggcggccgagtgcctgaagcccccagacagtgaggactgtggcgaagagcagacccgctggcacttcgatgcccaggccaacaactgcctgaccttcaccttcggccactgccaccgtaacctcaaccactttgagacctatgaggcctgcatgctggcctgcatgagcgggccgctggccgcgtgcagcctgcccgccctgcaggggccctgcaaagcctacgcgcctcgctgggcttacaacagccagacgggccagtgccagtcctttgtctatggtggctgcgagggcaatggcaacaactttgagagccgtgaggcctgtgaggagtcgtgccccttccccagggggaaccagcgctgtcgggcctgcaagcctcggcagaagctcgttaccagcttctgtcgcagcgactttgtcatcctgggccgagtctctgagctgaccgaggagcctgactcgggccgcgccctggtgactgtggatgaggtcctaaaggatgagaaaatgggcctcaagttcctgggccaggagccattggaggtcactctgcttcacgtggactgggcatgcccctgccccaacgtgaccgtgagcgagatgccgctcatcatcatgggggaggtggacggcggcatggccatgctgcgccccgatagctttgtgggcgcatcgagtgcccgccgggtcaggaagcttcgtgaggtcatgcacaagaagacctgtgacgtcctcaaggagtttcttggcttgcactgaagccccccacccctccctgccccctccctggccttcttccacctatccaccccaatgcctctcagcaaactgggcgaggtcagattagacaggcttgggacagcagggaaacatcaaccgacgtgtcacagaaaaagccacagaaggtctcagatcagcatctattctttgggttcaataaggggttcatatcttttttagctgagggggacaagaggagaagtcagtggacacatggaagttactcgtgaccaccagcttgctcagatattctcctcctcccctcactggccccacacccctggctctcccagtcaccctcccctagccagtctcccagcaagggtttaagagatggccgctgtgtgctggtcacaggaagtgttgaatggattggcttgcaaagggggtaggtggggagagataggagggcccagggactcatgggacacctttcccacagcctcctcgattgctgtgagcagaggccactcggagttaggggcatgggcaatagcaagctggcggcagagtccagcccagcatatgacttgccctgaatggaagctgctgaaacgggtgcctttgggtggtggtcggcttgcctctgaggccaccacggcaccagcagaatacgtatttcttctccttggctgcactggtttgtcgatctagttcagttcaactcagtggatgttctctgaatgcttactgggtgccaggaccacagagagatgttagtcactgcccagttcttagagccccaacacagataccctcatcccagggcccccagacacacccctccgctggactcacaactgtctggagtttctgtctgatggatggtgtgctttcatatgccactggcttccttggacatagatcagacaaaagccccgggatctgtttggtagcaggagaaatgaaggaagatgaaaaagcaggcagggaagggggtagtaaaggactgagagaggagggaggtggctggagaaggaaaaggaacattgctcgatgctcccatctggtggcggcctcaggaacccacgggaacctggaaggaggctctttgtgagacctgggcaaaggatggggcagctcgtcgatgatttttttgtgtttccaggcttcctgtgtgatcctggccctccggccgctagagagaggattgggaaaccccactgtcagctctgcatctgcccccactaccctcctctgccctattctgtccctgcccctccaagctgaagaaggtccttgtggggcgtcctcatttcttcctcaaatataaggaggaagataccaattaaaagctcatagtatcaactgcccttcttgtgtgattcgtttgggttatgatgggggagggagggaggtgggtagtgtcatttgctttggtgaccttacaagagggaagtctggccactgggagcatctttgggggatggagagatgctggtaatatgtgggccccttttgcagctccaaggccccttaactgatgctcagctcagctccgtgagttaagctgaggtcagagaggtgaggtgacttgccaagaacacaaaggcaggaaggggtgggtggcccagcccaggtgttctgatctgtaacctgctctcaccccagcgtgacagcacagttggtcaggtgcagtgtccagacccttccaccaatggtgtcaagttcagaggcaagaaggtggaggagatgggaacggagcaggcaaggacagctgccagctgtgactcactagggggcctctaggtgaggcctggtcccaggaagactgtgtcaaagccctaggtaaggtcagggtgtggggcttggttcccagaatggggacagcagtgcctttggccccaggaaggcccacagcagctcccgaggcatggagacgtgttcagccatggcacaccccacagcctgtttgtccccaagagacaccacttccctgcacagttgcctgtgttttcccgggccccaacccaaaagaagaatccaggcccagcctagcctggcccagcccatctcatctgcaataagggcgtgaggaggaggtcgggagcaggaagaacagaggcagaggatccagggtttctcaagttgacatcgggagaacactgagcacaaaacttagccaccaaagtggtgtgagcagcagccacgggtccccaccctgctcaggtcaggtaaccaaggagggtgaggatggtctcaccctgtcctcagaggcccagggacattctgtgcacctgcttccagctcgagctctagcacattaccatgcaagctgtgggggcaattgtccacatgccagcacctgtcacctcccttttcaaccccatttgcacagatacgggacctgaacgtgcggctgggccgggacagcagggcccccagtcgcacgtctgcttccctgatgaaggtgtgaggttcaggaaaatcccactgtggggctccctctcaccagaccactgcccacatacagccccagacctgggatccctgtcacactccagccccacctggcagagcgagaaaactcagcccgtgaagtcagacttgcctaggtctgaatctgggctctgctgcttacctgcaatctctctgagtctctgtttcctcatctgtaaaacagagggtagtaagatcactctacaagaggcttgggagctgggccctattaaccgggtacaactggaaagcccaggaaggaggacctggcgccgagtggctgccccctgccccctcccaccctcggcagctctcagctcagaacagaccccagaaccgaaaggcctcccctcacgtttctgggtctggggctttgcagtttcaaatgttttattctattgctcacagagtatatccaaagtgaacacccactatagactgatttggggttcagaaaatatgggcacttagggaatgggtggtttcgaacctattataacttctgacctactacctggcattcattttctatccttgaaaccaagccggggtcctttctttctgttaccctaggccttatacaaagcctggcatctagcaggagctcaggaaagggtggatggagctcccagggcctggttgccagccagtctcgggaggttgctttgctcagtcaaatcgaggagatttggccccagcctaggtcctgggacataacgaaattgaggcccctttatccaggctagactcacctgtctcctgtctgccctggatactcactcctcaccttcctgcacccacttggctctctccttcctgttctgaccctcagtttgcctcttcagaggactattcccgagcgggcctgtctccagatcagcccccagggcctctggggcagggcagcttggctttttccaccctccgcctcccccagcacctccagcctgctaggacactctgctccattgtctagccagccgctccgtagtctgatgtcaccccccggacagtggggctggagagcagggatggggtgaaccctgactagagtccacagcatcggtgattgccttaggccgtggggaactccctccgtccccttgtcctattgtaaaacagcagcatgcttgcgcacgtcctatgtgccaggtaccagctcttgtaagctccactgcaactggaggagacagaaggctattttgtaggtaggaaaactaaggctagacgggataagaaacttgccccaaatcggatgagtggcagagccaagacttgaatcctgccagtctgacttcagagtttttgttttgttttgtttttgagatggagtctcactctgtcacccaggctggagtgcagtggcatgatgtcagctcactgcaaccttcgcctcccgggttcaagcgattctcgtgcctcagcctccctgagtagctgggattacaggcgtgtgccaccatgcctggctaatttttgtatttttagtaaagacagagttttgccatgttggtcaggctggtttcgaactcctgacctccggtgatccgcctgcctcggcatctcaaagtgctgggattacaggcatgagccaccgcgcccagcccagagctcttaatgctcatgttatgttgtttctcctagtgtgcaacacacacacacaaacacacacacaccctgctctgggctgggcagtgtggagtcctatcaggaccccaaatatctctaaagagactgcctcccatcagcacacacataccactcagggctgtttacaacctcaccctgtgacaagtatttctatcacacacacaagcagtcctggcctagattcatcagccttctgcctactcatccttcaagactcagctccttggggaagcctctgctgtcccccggctgtgtgagcactcctctctgagtccctctccctctgtgtttgtgctgatccagatcagaatcattgcctagggcctccaggaagctgtgggcccagctctcagagctcatgggggtgcttgctgggtgaaacagagggtcctgggaccaggggccactcagcgctgctgcactgaacaaccacaagcctagaaggggcctctctggggtcctccctctttttcccagctccacctcatgttgcctcctcctcctcctcttcctcccacctctctgaagagtctgaagcttccctcctactctggagaatttgtgattaatgcaggcgggatgggtggcagggttcctgggccctattcttggctgtggcctcattctggaatgtgccctgaggtcaggtgacactcctcactcaggctgtgtcaggaggaaggaagagtaaacctccagctgacatctcctgagggagagggcagggtgggcaggtgggcaagcccctcacccctctcctgcctgcctcccaggctcctgaggccctcgacccatttcagggtcacgttggagtccctgcggtcccgtcccaaattaccccgggacacggtactccactaggtctccagcaatactctggccaccctcaaccccactcggatgagggaaagcagaacccagcccaacatagactagcctctcctggaggtggggcctcttcccaggtgtctgtcaggggcaaagggggcacttgcgtgctttcggcccttttcaggccttgaggacactgccagagacccgacgggaggaggtggacccatccagataacttgttttctgttttgatgtgagggatgcatccaattctgtccatagtctaagtgagagcagacgacggtgactttatctcctttctgggtgggtagcctggaagcgaggaggggcctagggttttctcaaggaccctgggcaggggagaagcacagtgccaggagtggggtggacatgagaatgctaacccctgcgccaggcactttacgtggactgcccggttgaatcctcccaaccctctgaaggcaccatattattttactatttcaccacttggcagatcacactctaagctgcaaccttcaggagggcaaagacctatacaccaaacacaagcctgaccatgttcattaagtgtttgtcgaatgaatgaatgaatggggcaagccctataggctttatggaggaaaagaggccctcataggtgctattttacagatgctgaatcggagactctaaatgtttaaaggacccaaggctatagggtcattaaatgaaagagccaagattcaaagccaagtctgtccgaatttggtacctgtacccttatcacgatattacatatgtattttaaccatcgcagttaaaggctgaggaccccaaatggcggttccccttctaaacacccataaccaccacttccaactggtccttgacctctgggagtaccaagggtttacagaaattttataaagccatacccttcaatactgttagtactgaattcatgtaaatgaatttaaattaaataaaaacgtaaaattcatttcctcagttacgctagttatggatcaagtgccatgtttcatgtggctggtagctgccatactggacaacacagacagaatatttccaacattacaggaaattctattgcacacccctgttacaaaggattgacacaaatttctctttactcccattgtctcatgaccctgatctcagcctcagtatgccctcatcttttctcctgaaaagcttatacatcttttttcttttctctcttttttttttttttttttttttttggagatggagtttcactctcttacccaggctggagtgcaatggtgcaatctcggctcactgcaacctctacctcctggcttcaagtgattctcctgtctcagcctcccaagtagctgggattacaggcgcccaccatcacacccggctaatcttcatatttttagtagagatagggtttcgccattttgaccaggctggtctcgacctcctgacctaagtgatccacctgcctcggcctcccaaagtgctgggattagaggtgtaagccactgtgcttggccaggtttatatatcttcatgcaaataaagttcttgatggcctccctcaataccccagagttcccaaaaagggacacaaataagtgcgcacacacacgcagcaccagcagtcatgacacgcaggtgaagatgagttctccaaacttttagctgaatatggtaggggtgctgctgatgggaaggagacagtgggaatgagaggctaagtcctcccatggcacagcacagtgcccatgacagctgccgcctcccaggaatcagcctgccaccaggccagttattcagcagcttttcagagacacctatgctgcagctgtcatcttgtttcttgcatggaagtgctgactaaaagtctaataattattttgttagtggtcattgctgctataagtgtgctgcataaatgtttaaaaagagggcccagggggctctgttctgcaggatgggggtggttaaagacgtcaagaactaggcctactttaagagatacacgtgaaatttagaaaatgacaagagggtaaaactgattactatctttggaaacccttggtgatataggataaaaacaagtataacatgcccaaatacaggaaaagtcatgtaactaatagagatatcatttgtcagattacttatgctcacatagaaggggatatgatagtctgtacagcttatgcacatgaactgccaaaatgcaatgtgaaggttggcctgacagatgacgctgcagcctgttgtaccagcctgtgctgacctgcaggcttctcaataggttcggcatggacaagatctatgatggccaagagaaggtgaccagagatgaattataatgtggaaagcattgatggtcagcccggtgccttcacctgctatttggatgcaggctttgccagaactactattggcaataaagtttttggggcactgaagggagctgtggatggaggcttgtctatccctcacagtaccaaatgattccctgcttatgattctgaaggcaaggaatttaatgaagaagtacatcagaagtacatcataggtcagaatgttgcagattggatgcatcacctaatggaagaaaataaagatgcttacaagaaagagttatctcaatacataaagaacagtgtaactacagacgtggtggaggagatgtgtaaggaagctcatgctgctatacaagagaatctagctgtgttagtctgttcttgcactgctataaagaaatgcccaagactggacaatttatgaagaaaagaggtttaattggcaggctatgcaggaaacatagcagcttctgcttctggggaggcctcagaaaacttacaatcatggcagaaggcaaaggggaagcaggcacgtcttacatggctagagcaggaggaagagagagaggggggaagtgctacatacttttaaacatccagagctcccaatgacttcctcactcactatcacgagaacagcactgagaggtgatgccaaaccattcatgagaaactacccccatgatccagtcatcccccaccaggcctctcctccaacactggggattaaaatttgacatgcaatttggtggggacacagatgccaaccatatcaccagtccatgagaagaagcccgagaaagaagctaaaaagaggagatagaaccgtccccaaatgtcccttgcccagaagaaagattgggtagctcaaaagaaggcaagcttgttttctctgagccctctcttacaagagcagaggagcagactgctgagggctaaaccaaacaacaattttctttctttcttttttttttttttgagatagagtcttgttctgtcacccaggctagagttcagtggtgcgatcttggctcagggcaacctccacctcccgggttcaagcaattctcctgcctcagcctccccagtagctgggattacaggcaaaccccaccacaccaggctaatttttgtatttttagtagagacagggtttcaccatgttggccagactggtcttgaatgcctggcctcagttgatccgcctgccttagcctcccaaagtgctgaaattacaggcgtgggacaccacgcccggccccagacaacaattttctatgaggatttttcagataaagacaatcaacatattaagcaataaataaatagataagtaaataaggggccagatattttaggccgcaaggtccccaaatctccttgctatccagggtgggccggcagtgagaaaaggtcacagtcatggcagagcataggttcaaatactggctttgtgactttgagtagttaacttctctgtgccttagtattatcatctatacaacagaataataatggtagccatagtgcctctccagggtagttggtcctgggcctcattgcttcagtttgttggggataattgctgttgcacgtccctgccaatgattggagcaagaaccaggaggggagaacaggcccctctcccagagcaaagtgagaacagatgcagtctcctttgctgataaggaaagagtccaggaggagggtagctggagaagagagggggagagcaggagggcaggaatgagaggaaaaagaagagggatggggagatgcatacacacatacgcacacactcggggttgtgcagttggaggcccaggaagaaaagataaagtgtagtaatttggttagagatgaggaacctctgagacctccatggaggccctaagaatatttctgaacccttcattcccagctccaacacctcggggcacagaactaagctctcaatgaccccttatttcaagtgccactctccatctcaatgtaccacaaggggcaacagaataaaaggggaaacagccttaggaccctggtatgatcaataacagactcaaagcaatcctcacaatcattacaaccagcaattttaccctgtgaccctaataagcgctgaagctggtgtttatggatgactagaacacagctttagtgagacttacacggatggtaacccatccctgtcccagacctcatagaaggtgggcaccctttaccaattagatgcccttttggtagggttaataatttccattactaatagcttacagcacttaatatgtgttcaacatgcattatctcattaaatatttacaaccctgtgatgtgtatatttttcacctccatttaataacctgtccatttcagagataatgaaactgaggctcagggagattgaataattttcccaaagtccctggccaagcagggaaccaaacctaggcgtgtctatatgactccaaaggccacgtacttaaccgcatgtgtgatattttccaccacagattcaagaacagtcaagtctggtttcgtctcatttttgtgtcctcccttctccctgctaatataccaggaagttttacttcctaggattctcatgaaaaggcacgtttatagccagctgacctcccctaaataggctgagcacatgcccttgaggctaagccgtgcggggagaggtggaggatttgagccctctctcaccacagagtaaagagagtgcaggttattctatgtagggaagaggattatgctgaatgctttatttatcttacatgctcatcacaccaaccctaacaagtagaatttggaacccttttacagttaggaaatctgaggtggaatcgttttaacagtgcactgctatttaaggttgagtttgagatttgattcaaagtctgaccccaggccaggcgtggtggctcacacctgtaatcccagcattttgggaggccgaggcagcggatcacctgaggtctgaagtttgagaccagcctggccaatatggtgaaaccccgtctctactaaaaatacaaaaaaattagccgggcttggggctgggcacctgtaatcccagctactcaggaggctgaggtaggagaatcccttcaactcaggaagcagaggttgcagtgagccgatattgcgccactgcactccggcctgggtgatagagcaagactctgtctcagaaaaaaaaaaaaaaggaaaaaaaaaagtctgaccccaaagcccacgttctttctcatagaggatcacgaggagtaatgttatttggaggctgaatgaagccccctacaccactctagagcattcttacatctgcaggggaaattgtggggcctaaacatgtgtccccgctggtcaagtgagtgtgagacaaggatcagacgctggtgtcttctgtgccaaagcaggatccacactctgtacagaatagtgatgctctctgaacagtcccaggtcacatgaaggagtttggccagcttgtggtggtattttcagtggatgacagagtgctcagccaccaagagaacttagggaagcctggggaagggcattgcccggggaagtgacccaggcgaaaagttatttgggaatgttaatttctggctgaaatttatacaaagctttcccttcaaagcctcattctttgatttatgttcaaaccggaagatattacaagcacccaaaaagccaaactggaaaaggaaactgcagagctccacagacttgttgccttggccaggggtagggtgtggcgatgggagtggcaactgggagtgacctgggggtgtctgagtttgtgcaatgaacacgcactttccaccaacaccaacttctggaggggtagtacctgctgtgagccctgacatcacaaaaccaaaagaggctttgtcactaaaggtaggaaaacaaatgagatgacccctagagggagcttctagcctgaggaagtttctagattaagcatgaaactgaaactgtcttaaaaggaaggaattcgacatccctctgacacagcctgacgcccctctcagtcccaccttttctttccttggacttcttactggtcctccccatctcactcctgggtttgatgaataaagaagttttaaactatttctctttcataatgtttctgtacaaagcttgaaacagtgaaaaaataagttaaaatgttcaaattcaaaggcaggttctcccaggagagatgggctggcagcagagcttctatttctgatttcctctgcctttttccccaagggttagcagcacacattcttcctactgtggctacatctgatgaagaacacacacacacacacacacacacacacacacacacacacaccaggaccaaggttttcctctcaactgcctgttcctccactggagctgggaatttgagggagcccaggcttccccgggtgcttccagtggacattgtacccattcttcatagctggatatctccccccagatctagcatccctaagataggcacagtctcacccttttttgttcatacccctacattttcctgtgtattatgattatttgggcgtgtgtgttatcgtttgctagaatgtaagctcctttagaggttccgaaggattgtatatatcactgccagttcctaacgcaggagatgcttaataaatgtgttgagtggatgaatacaggagctgtttttaatcatatctcaccttgtttgagaaagaatttagggacaagaatggaatctgagcccagggcagccacttgagtcaacatcacccttttgctatcacaagtactagtaaagctcaggacccaagacttcagtatgtgaagtgcctatagttgcttctcaacaaatctaatcatccagagagcagtcgcaatgtaagtaagtaaagctagcacgtagccctcaaactcatatcttactccattgtgtttttgcaaccgatttccctttcctaattgtgcctggcaaaggctgatagcaaaataagtttgggattgctgagcaaacaatcacaagtgaggtttgcaggagagggggactgggcacaaagtgcagcttagatgacttctaaataatcaggtggggctctttttataaaatcgaccggttgaggtcaaccaagggagcaggatagtgtaatggttaaggatcatggactttggaaacagaatcccacagttcaaatcctagctccgctggctgtgactgttgcaagctctctgcctccacttatatatctgtaaatgggagaaacagtacaaccttcagagggttgttatgaagttgaactgaatttaaatggggcagtatctagcacatagtaaattcatataagggttgccattattactactgagcttttggggttggtcattccctctggattccataagactttgtgatagtataaaaatcatccttcaaataggcagtgctttacgtaggagcagttccccatcctccttgaaaatctgggaaaaaaacacgcgcacaatctttgggaaatggcggtgtcagaacttctgcaaagcctccttccgaggaaactgatctccagggcaagttgtcaggcagtgtatgcataagctctctcctttactgtcctttccacctttcccaggccctggaagcaaaggcagatagaagacataacaccctggtcccttgccggctgccagacccttctcctttggcagatgctcctggggagataagctctcacctccatctctctattccttttacacagaacccaaaaagttctttgaactttagtggttcagaaaataaacaagaatcttctttctaagttaccaaaaaaaagtttccttcctttcttccagcctttttcaagattcacaaagaagaatttccccaggtaaaaatcttttatagctgtgtgaaaactgtttgttctcaaagtctttagttaaagagcctctggtgacaccttagtttctagaaaggttgactgcaaagattgcagctatcttaaaccttgtattaaaatggtttaagagattcctatcatgttttctggaaataaaaagaaattagaataaagtaagtcaccagggctccacaaaactttagaatggcaggtagtttgcaaaactaggagagttctttttgggaaaagagatttgagggcagtaggcagatctggataatcagagtgaagaaagaataggcattgtcattacaaaacaaaacaaaattcaaccttcatccttactaaaaatgcatcgatggggccgagcgcagtggctcacgcctgtaatcccagcattttgggaggccaaggcgggcagatcacgaggtcaggagttcgagaccagcttaaccaatatggtgaaaccccgtctctactaaaaatacaaaaattagcagggcgtggtggcacgtgcctgtaatctcagctactcaggagtatgaggcaggagaattgctggaacccgggaggcggaagttgcagtgaaccgagattgcgccactgcactccagcctgggtgacagagtgagactccgttccccctccaaaaaaaaaaaaaaaggaaaaagaaatgcattgatggctagtggaggggtggcaagggaaagccatctgaaaggaatacctgcatttagtgcaaaacagaaaaagatgttcctatgcctggaaactactgaacctgtgtcacaaggtgtctggatactgtactaaagtgtacaatatttgcagggtaggatgattccatttctttctttttctttttttttttttgagatggagtcttcctctgtcgctcaggctggagtgcagtggtgcgatctcggctcactgcgacccgcctcctggattccagtgattctcctgcctcatcctccccagtacctgagattacaggcacgtgctgccatgccctgctaatttttgtattttcagtagagacggggtttcacctattggtcaggctggtctcaaactcctgacttcatgatccgcctgcctcagcctcccaaagtgctgggattacaggcatgagccaccacacccggccagtaattccatttcttaaatcatactgatatgatactgatagcattcctttctatcaatatacagaagtcatttacttatactcaccatttgctagaaaacaagctagactgatgccacgtccattcttgacactctttctttctggcctaaaggaagcacaaaatcgttttaagtcagtcttcacactccaaaagagtgtgcaacataattttccagctttctcactagcactaagaaagaggaaaaaaagacctcaaaagctatagaagggcatgtggagaatcagagtttaaaaatagctgcaacctgatggccaggaaggaagtttatgtttaacattcagtgcaaaaaacaaaacaaaacaaaacaaaacaaaccccacatgaaatcaatgtctagctcattttgtcaatgtggtttttccacaattatttttgaaacacttgaaaagtgtataggcagaagggatgcgacctacggtatatgccaaagtttgtctaaaaatattttacacctgttctctgtactgcacactggtcatattttatcagtgaagtaagtactcataatgccagacggaatgtgtttttccttccaagtcctctatgtttttccctttggtaaagcgaacctcctcttcttttctacctgcactaaaataaagctagcaccattatccatgtgacgtatccaccaccaagctacattttaactactattcctcaggcaatattgtttaaataagaacaactatgtcaatatttttcacaacagcaaggacattttaacttagcaaacacttatggctgctcccaaaaggaaatgtcaactagtatactgagttttaatcaacttgccaactgtatgaaaaagaatgcactagttgccttcagtgcttcaaaactagaaatacaaactccgtgatacttattcttatgaaaataattatacttattttatgaaacatgagcttttagaatattactgtagaatttcaattttctgttgacgcaaataactgacagcaacatgttcacataaggcagttataatcttcatttactttcctcattttaaagggcagcgaacatggctagaattctggactttatggcttctaaatactgtgagcccctatggacacatgttctattagttgactgacaactcttaatagcaaatgattagttctcatagctcctcagggaagcatattggtatcactgtactcattttgcagatgaataaactgagccatctgaatcaaatgacttcatacaattcagcaaggaatttagacctgtagtttcagttagccactagacaactagacagggactgcctgttgattaaatgttttcgtctaaggtttgcctaattgtgagatgatctcaaagttctcactaacagactatatatacaaaccaagtcctctaagacataaaatcttaaaacttcaaatactgagaaatggttaatgtaggttttactattaatacttacgagtcaaattccattaataagactttcagcccaatctaaaccacctaaagctcaactaaggggtcagcaatatttgcttcaatcaaatgccaactaacccaacaatgtaaacagtatttagtataacaggatttaatccacatagaaactacagaaattctcctgagccttttttttttttttttttgagatggagtcttgctctgtcgcccaggctagagtgcagtgcctggttcacaccattctcctgcctcagcctcccgagtagctgggactacaggcgcccgccaccacacccggctaattttttgtatttttagtagagacggggtttcactgtattagccaggatggtctcgatctcctgacctcgtgatccgcccacctcggcctcccaaagtgctgggattacaggcgtgagccaccgcgcccggccttggcctttctttagagtgtttatcaataagcacagacaaggaatggttgtgaaaatagcaacaggaggttaacggttacaactttacttgtaaccgaccactaaatgtagtcagggaatcatccagtagttctgaaaagagatgtaatttatatgactgaattatgaaaaccaaaaaaactagagcattgctaggtgtggtggctcacgcctgtaatcccagtactttgggaggccgaggtgggcagatgacctgaggtcaggagttcgagaccagcctggccaatatagtgaaaccctgtctctactaaaaatacaaaaattagctgggtgtggtggtgtgcacctgtaatcccagctactcaggaggctgagacaggagaatcgcttgaacctgggagatggaggttgcatgggaggtagaggttgcagtaagccaagattgtgcaactgcactccagcctgggcaacagagcaagactccatctcaaaaaaaaaaaaaaaaaaaaaaaaaaaaaaaaaacaaaaaactagagcaatgatataacaatgatttctaaaaacatttccttattgcctatgagttcagtttatgaccaatagaaatataaagtctcactcaaaatatcatcatggcatattctgagcatggttaatagccttccactagacccctctcattaacacttttgtaaagattctgcaaattacgtagctaatacatcgaaaatggtgttattaccctgacttcaaatcagaatagcaactaatctgagggagcaaagcatagtgcttaagagcgtgaactctggaaccactacctgcatttgaatcgctagtctgccatgtattggccatgcaatcttgggtcagtgaagctttctgtgcctcagtcccatccccctccccctgacccagtctataaactgggttagaactacacttgacacatagtaagtgctatatgtttatttcctgatttaaaagatttttaaaaatggctccaactacatgtttacataagccactcaaaaatggtttcaaactgggcatgcaattggaaaatgtgctaattttccaattgtatgcccacagataattgatcctaaatcatttaaactacaagatataatcttcctaatataccacaaaaactaaagcactctgatctcaaatgacctcctgggccaaactgattaagcgtcaattgattggtatactaaacaatgcaatgggttttattcagcagtgaccattttacatacttgtcttctgtttttcttgtatctgtttttgcactagagttgtcacccagcatctgacaaaagcatgcatttccagtcaagcaagggtacgtatctgatgtagcatgcctatgccattttctgtttgtgtaccgaaaggatataaaggaaggtctaccaaccggcattttacttcattagcttaagtatgtccaatgagacatactttgtttctttctgtgtcacagtgacttattttaaaataatcgaagtcctgaagatttattaagtctctcaattaaaatgccagacatgtatatgggaacgaaatttacacccgattggaaaaacattattttattttatttttttgagactgagtttcgctcttctcacccaggttggaaggcagtggcacaatcttggctcactgcaacctccgcctccgggttcatgtgattctcctgcctcaccctcccagcctgtagctgggactacaggtgcatgccatcacacctggctaattttgtgtttttagtagagatgggtttcgccatgttggccaggctggtctcaaactcctgacctcaagtgatccacctgtctcggcctcccaaagtgctgggattacaggtatgagccacagcacctgccctggaaaaatattttaaactcagagtacctttagtttcaccttcaaaagctaagttaactaatcacagcatatattgttatctttaaggaggcattttgaagaaggcctatatttacatttgccatctattataggcgaaaaggacatttcacaatgtacctgatttcagaaacgacaaggcagggcagaaaacgaatatactaaacttagaaagccattttttggtataatattccttactcatccatgagctatgaaatctgtaaggcaacattttggacactcagggtattcagaggctgctacagtatctgtagttataggagtcaaaaagatgggaaaggcctgtgaaaataacgaattcatcaaattgtcaaccgaaatggtctccccacagagagtcaaaagtgtgatggcaccttggggagaaaatgacttggaactaagatgtaaccttttctcagatgtgctaggcaaaagcaccttttaaaaaattcccattcctaatgaacaaaaagggcatgtaaacagggcctttgttcattttttaaaaaattatgaagtcctcgctggatgcgttggctcgcacctgtaatcccagcattttgggaggccaaagcgggaggatcatgagatcaggcgatcgagaccattctggccaaccccgtctcgtctctactaaaactataaaaattagctgggcgtggtggcgcgcgtctgtagtcccagctacttgggaggttgaggcaggagaatcacttgaacccgacaggcggaggttgcagggagccaagatttcaccactgcactccagcctggcaacagagcgagactctgtctaaaaaaaaaaaaagatgaagttctcaaggacaccaagctcaagttttaataaaaccaatcaagatcacattttgagttagtcattctccgatgtcaaacatatgtaccaagatgaaatttccctaagatttttgtcgatacatatatccttaagatctgaaacagatattcaggcttatgttaacctcagtatttaaaatctgaatatattagtgcttggctgggtgtggtggctcacgcctgtaatctcagcattttgggaggccaatgcgggcggatcaccttagttcaggagtttgagaccagcccaggcaacgtggcgaaaccctgcctctacaaaaaatacaaaaattagcagggaacggtggcacgcagctataatcccagctattcaggagagtgagacaggagaatcgctttagtggaggttgcagtaagccaagatggcccctttgcactccagcctgggtgacagagtgagaccttgtctcaaaataaaatgaatatattagtgctccagacagtttcaaattctattgttgaccaggcgcaatggctcatgcctgtaatcagagcactttgggaagccaaggcaggcagctcatttgaggccaggagttcgagaccagcctggtcaacatggtgaaaccccgtctctactaaaaatacaaaaattagccaacatggtggcgggcgcctgtagtctcagctactcgggaagttgaggcaggagaatcacttgaacctgggaggtggaaggttgcagtgagccgagatggtgccactgcactccagcctgggtgacagagcaagagactccgtctcaaaaaaaaaaaaaattctattatgttccgtccagctgccttatgattttcagaaaaagcacattacacttgagccttcatttataagtagagttttctcccaaatgtaactttatcagtctgtagcagaaactagtgcttaaagccattatcctgatggttcttacagctattcaaacttcgtgatcacaaaagcatgtaagtggtaagtgttggcagaccagatctctgctgcttgcacccattattccaatacttcttcatagcctcgttctgttccctaaagaacaaaagcctcaccatggagctgacaaacagcttagctctgttatttccagtgcttgtttccttaaaactttgtattgctctacactgcatgggtaaatgacaaaaggcttttgtagactggtgtccaaaaagctcatgagaccaaatttatttcactggtaacccaggcagtgctggtttcttactataaaagtacatataaagttttttaagacagctttctcaccaatactatgtcaacactgtatcaaatggacgttaactttctcaccaatactatgtcaatactgtatcaattgacatttagtgaaatgactcatttagtgttcttctccccaactcttcagttttaaaaaactccatcctcaccaagccactccaatttgatacattgtcaatatctctaaatccttcaaaccagcaggttgggtacccacttgcaaaaaattaaatacataagcgtttttgctgggaaaatgaaaatgctaacatctaaccatctgtccagccgtgaatagattttgaccataagttctctagctatatgcaatagctaaactttaaagattagtaaagtgatgtaaatttttctaagttcagtcagccgttttgtccaagcaagtttcctcagcaaaaacagaaaactgatccaatgctctctccatataaatttcaaataaatcatctcagattacacgaaggaatttcatcttatcacctgactcctccatgtcagcatgacattttgaaacttgctgtatagctaaccttaccataccatctctataatggggtagacaaatgtggactgaagagggctgttaaaaaataaagttgtaccaagcactggtcaggctatagttttgatagcattttttatgtggcaaaccacgatctggtacatcagtagagcaactgctttccattattccttcgtgactcaatgagtcaggcctttttccatcattagcatttacaacataataactccagaggtcgatcttcagaaaacacttaaaaacaaagacaataggcatttttaattttaaagaattttaatacaaacttaatataaactatttcagtccctcttaacatgtaagacactgactcaaaatacttttataccgtttttttcaagtattgcacaatataggtacaaaattaatatttacgattacatttttcttccataatatatagcaaaaatctttaaacttttaacagaaaatacatttttttgaaaaagcaagtattcgtacattttaattccaccactaaaggaatatcctgtacacaatttttagaatagttgatgtctttaagatggatattttacaatttcagtaaaaaaaatacaacatgaagctgctgctgtcacagatcactgtagtaaaaagatataaatgcaataccatgtcgtagaaacaatatatatatatcctctgatattttacaaactttgtactaaattaaattatacaattagaaaagaccaataaacccacttattagtgccaatttttataaaaaaaaatcagccatgtccttgctatatcttaaatactgtaagaggccatatctgagagtatactttaaaatatacagtcagtataaaataactttgtgcttggttggcaaatgaaaaatgatgcatgttttattattatttttttaaccaagcttgaatgtatccttactataagcttaaaaaaaaaaattctcaaggaggtgaaaaaaaaaatcccccttgggcccgtgcattttaacttgtacgatacattttcttttttttagttagccataacaggctggaattgctggttagaatactgcatgttatttaagctaaaattcaagccatctacaaaagatttctcattgaggcctccataggctgcaaacacatcaaaggcattactgtactggagaggactgaggttaagggggctgtcacctgggaacattccattggtactactaccttgaccctgcatattaggaaaaataaattccttggcattaggagaaagagcagaggttttctgctgttgttgctgctgtggtggtggtggtggcggtggcggctgggctggctgctgctgttgctgtggctgctgctggctacccaagccaagcccatacagagagtgcattgaggaagagatggctttctgcttcaagaggtcattcacattcaagccgaggttgatgggagaagtacgtgcaaccttgttgctacggccactattcttcattttggtagagccgaacttggtggcagcaaaagtggcagtggtaaaggttaaaggctgagtggaccggggcatgaaggtagggcttacagcagcagagtgaccaaaaggaggcgatggagagctggacactgatgaggctgggtcacttatgggcataaaaacctgggcctctgggttaaagctgtttttgatctccttatccaactcacatccattttcattattatcatccacgtaaagcaccttcactggtcccttttcaccaatttggtaagaaacctcaaatgggtcgatccaaacactaagatcctgtggcagattgccacgaacatcatcaatgtccaaaccactctctttggatgcttgttcaatcactgggtccactttctcccctatgtgtatacatctaaaccccgatcctttgtatggcttttcaggataccagtgcccttcatatttcttcttaagaagtctttcaagttcttcaccaaaaatgttgacacgtctcctgggaagcttattgtacaaatacgaaataataaaatttagtgctacttggatttcaagctgcatagctgctacgccacaaaattaggtttcaactcccccaccaaaaaaaaaaaaaaaaaaaaaagatgttcagtttgtggcagagaaacaaattttcattcaaagtgctggtattagtagattatccttcaccttgagtgatcttgttccttaaaacaaaagcaaacatatccaaataagataaatgtaatataagtcccatgaccttcccccctccaaagtaatttcacctttcaaaatgtctaagatcctgtgttagtctgctaaggataaaaagaaaaagaaaatgtctactaggacagaaagcctgaaaactgttactagcacaaaataaacataaaatagaaaatcgtttattaaagtttaaaatgacacaggaaaatgtagatttacaaatgaaataatgcttttaaaaacctgtttctgaatagagttctaagaagaaaaatctctagaacatgcattcttctctcctcagttctcacaagaatatttattgtactcagcatcctccccccacccccatatatatagatgccacttttaggtagtaatttttattgttattcaccaacttagaagtgaatccatgttttagtttactttggatatatactgtttaaatctgctctgtcactgacatttaaaaatttggttacgttaggaagatcattttaatttccatagtacatgatgctaaaattaaagacactgagtactaaatgaacttcatcctagtaaataattatgaaccaaattattctatatagtttcggccttaagtatactaagagcatacaatataataaaatccagcttctctgggccttttgttttcaatgtgtatttttctaaatctgaaaatacctattcggcagcaagtataacaaaagcaaagacacaaattaaaactattgattattctgtttaaggccagggtttctgagttttagtctgattttaaaaaacctccgtctgtccctctctccctccctccctctcacggtaacagccggagaggcaagtatggtaaggtcgacctttaaacgtttgctggatcagcactgggtggggataagaaaagatcaagggcaaacagaagatatttgcgaaagggatctatttgcacactgaagttgatttaaaagtacgtttaaaaatcaagttggtcttaattcgtctgttctattttccatattcgtggtgacaaagggaaaaagaatctctggctgcccccaaactacaaacactttccaagtcaaaagcctgagtgccggcagaggcagctgattaagcccaattgcttgaaggtgcagccgagcgaaattcaggctcggtggaaggtagttacaaagcaacgccttaagacaggcaggagtgtgaagaattacataaacagccagttagatctcattagatttctgctcacagccctcggagcccaagcgctacagcagcagcaacagcaagaggaggtggaggtggaggaggaagagagtacgagcctcctcggagaaggaggaggaaggcccgggaaatggaagagcaacctctcccggctgggcacccagcaccgagcaggtcggggcgccgggtcagccgctcccctcccccgccgtaacccgacccgctgctccccgccccgtggcccccgccccgggctcctgggagccggccagagcctgggggagcaccggttcctcggcaccattttcagcctcgcggccaccggcccctcgaaccccagcgttccaccgcgagctcgtcgctcctccgggcaccccaaccccccaattcccgtcagctcgccccgggccgcccgtccccggccaactgcccaggacgagcccgacgcgccggcggcccctcggagccgctcccctcgggtcctggcgctgccccctcggcgcccagggccgcgaccccgccgtccccgagctcccgagggcccagggctcgacgccgctgcagcccctcctccgccgcctgggcccggggctcccgtctcctcgccgaccccgcccggcgccccgagatacttacgggctgcttcggggcggcttggaccacagacccgcggctgggcggggagcagcgcggcagggcgggggcgcgggagggtcgggagcggcgagctcgccgagtgcaagacgttgccgctgcggggctgaggacagaggacagaggcctcgggcaggccttgggagatcgccgttagtggctcggggtggcgggcacgggggtcagacgagcgcgctcacttctccacacagcccggtgcccggcccagcgtccccgtagtgcgcccgctacacgccgggccagagcttcgctccttctgccgcggcgcgcgccccgcctctcgttttatggcctcctccccgcccccatcccctccgtcggggtgcgcgcgcccgctccgcgtcacacagctccggcggcgcagccattccccgcgctccccgcccggcaccccggtcccccgccggccggctccgcccctgccctgccccccgacgccattggccaagtcccgcctgcccctgtccggacgcgcggcggacgcaggggtggggaagccgcaccctccgggctccaggagggccaatgaaccgacgatcggagcactggggacggaatgaagagaacgtctggaaagggactgtgggggcagacgtgccaatgagagagaaaggggtggggtagggcggctgacgcccggtttaggcggagagcgccgggcagagggggagggggacgaagctggtggcgaagcggctcaggagaaccggggctggaggagcggcaagagtacccagaaagtgccctctccgcgggggtctgcggccaaggaggatcctgctcgtggaatagctaccaaatcggcctccagcccaccccaggggcggggtagagaaagggcaaactgtgaccgggacttgtgcacccgattaattgaatattaatcaccccaaggcctaggccaaccgccacccagagagtggcagctgcagaacccaaagacgtggagccgggctgggggtggggaagggaggccgccacagctcccgccccgccggcagtttaactgcttccgcagcctcaggcctcccggtgcgaccccggctgcgactcggatccgtttattccaaatgtcccagcccacgccgtgcccagagtgtggcgacacgaggccaaactgcgtatgtatctgtgtccatgtctacacacacacgcatgcgtgcatttctagggcttgctggatcgcaggtgcacagaataaacgcggtgcctgcttgtaaagcgcgtttaagatcattcttggctgaaatatgtgcgggtacctagggagtggggtaagagagggactcgtggtggggggcgggtaagtgcctttttcacaacctgccccagagaaatacacgaaattacatcgggagtggaatcgagcgtccctctcagctaaaaatattactcacaggtagcaacgacgcctgattggctgcgctggtcccttcgcaacgaggcgattggctgcctggtatccaggagaccgacgtcaaactcggactgggaaaaggggaaagtctggggggagcgaaggaggggacggggagaaagaagcaatgaatgaaacgcccatcgcctggccttcccctttcccctttcccctctcctctccattcttggagcacttcctggaaaaacaccagttggggcgccgccttcccctccaaacgttggggcctgcactctcaacctgctataaggaagttaaaccgcagctcaccgaggagtagggtgtctacggggcgggcccgtgtagaccagctgtgctcctcgggcacaaacccgccgtacatgccaggcctagaagcttttggctttgtggacgcaaaatctggttggagccgccttctccaccctgactctcccgcctctcctttttagaaggaaccgcactgagaaagggtatttctgaaggctcaatgcgtaggagaaggggtgggaagatgggtttgtggaatgggctgagggtggggagtggtcaggtgactgatttcatgtttattgtacagattcctaaaacatagttttactaagtgactccttaaattctgattaatgtgatttttttttttttttgagtgtttgggttttttagttgcaaacaggagtggaattgaaatgtgaaagtatggcaaaactgtgaaagcatttaaattaaaatgtcccttcctctgcattgaaatgtcatcaaagcgtcaaatataaatgatttgttcagttttctttttttatttgtttgtttttggttttctgtaatgacaagtccatctgtaataaaagtgagttatttttagttttctaattaagcacagaaatttcaagaaactagacaggatatccttggaatgccttaccaaaagaaacacttcatttttcacgtgttctagaagcacaacttcttttaccattaggcaaataatggtactgtaccaaacatctagaactgcgggaccatgtgtcttgattagtaattttatattgggggggcatattaggcatggctgagactaaaatgtctaaagatagatgaattgtaattttgtcaaacttatctgtacttttcaataattctctaaagagaagggacaagttctcttttctgaatgtcttcaatctgtaattccagatttgaaatatgagagcagtcatctgataggtactgattaaatatcagtagcattaaaagcatttttaagtcagaaatgtagatgtcaaaaatttatgagttattgctgcttggcctaggagtgtaagaagatgtctgaccaaatataaacacacacacacacaccacacaaacaacacacacggaggccccatggcatactggaaaaagcaatgaagggtgggtactgggaggtctgagtttcacaccagtttcaataaacttttagttttctcacctataaaaagggttgaattagatcatatctaatgtctccttcaattaaaaaaaaattccacacttggctgggagcagtggcttacgcctgtaatcccagcactttgggaggctgaggcaggcagattacctgagctcaggaatttgagaccagcctggccaacacggtgaaaccccgtctctactgaaaatacaaaaattagccgggtgtagtggcacacgcctgtaatcccagctacttgggaggctgaggcaggagaattgcttgagcctgggagatggaggttgcagtgcgccgcgatcgtgccactgcactcctgctggccgacagagcgagactctctctcaaaaaaataaataaataaaatattccgcccttaaaactcaatgttcctaacatatatactgcagctgttcttcaaatacagattgcaagtcagggcgcggtggctctcgcctgtaatcccagtactttgggaggccaaggtgggtggatcatctgaggtcgggagctcgagatcagcttgaccaacatggagaaaccctgtctctactaaaaatacaaaattagcctggcatggtggcgcatgcctgtaatcccagctactcgggaggctgaggcaggagaatcacttgaacccgggaggcggaggttgcggtgagctgggatcgcgccattgcactccagcctaggcaacaggagcaaaacttcgtttcaaaaaagaaaaaaaatacatatatatggattgcaaataaaagggaaaactgattcacatctctgaacattgccagtcacgaggtataaaatgttctttatccaagttctgcatatggcttattattatctaacatttactttggaattgtgcaggggagtggagggctaactgctaattgtgcagggaattagacttatggaggaaaaaagaatttgatattaggctccaagtgtatcacaatcaagaggtattcctctctctgagcaaataacagtcactagaaactacagcctttgcctttcacatccctacattctacacaattcccagtgggcccttacaataaaggtaatcgtttggtaaaaaataacttccaatatcttcataaaatacagttcttgaaagtgccttgaattattacctaatccacacaagaacacacacatgcaacaccttgatttctgagatagagacatcctaagttttctaattcttaatatgcttccttgtaaattgagaaagggttacaggagaatagctatcacatggtgtataattattaatactcattttacttcttttttttttttttttttttttttgagacagagtctcactctgtcgccaggctggagtgcagtggcacagtcttggctcactgcaacctctgccttccgggttcaagtgattctcctgcctcagcctcccaagtagctgggactacaggcatgcgccaccactcccagctaacttttgtatttttagtagagatggggtttcaccatgttggccaggatggtctctatctcttgacctcgtgatccgcccgcctcggcctcccaaagtgttgggattacaggcatgagccaccgcacccggccgactcatttcacttctaaggaatcaaccttttacctttatttgaaaataagacaggcagggcaaggtggctcacatgctcgtaatgccagcattttaggaggcttgaggcgggaggatcccttgagccgaggagttcgagatcagcctatgcaacacagtgagacccctatctctattttatttaaaaaaaaaaaaaaggcgggagtggtgatgcacacctgtagtcccagctacttggaaggctgaggtgggagaatctcttgagacaaggaggtggagaccagcctatacagcatagcgaggccgtttctattttattttcttttattttttaaaaattagccgggcgtggtggcgcacacctgtagttccagctacttggaaggccgaggcaggaggatctcttgagaccaggaggtcgaggctgcagtgagcagtgatcgtgccactgcactccagcctgagcaacagagggaggccttgtctcaaactaacaacaacaaaaaaaccccataatgttcttattgtgatttttatttatttctttttaaacggtcatgcaacataaatcatagcacacacattttaaaattattattaattttttttgagacagagtctcgctctgcgcccaggctggagtgcagctcactgcagcctcccgggttcaagtgattcttccacctcagcctcccgagtagctgggattacaggcacccgctatcatgcccagctaatttttgtatttttgtagagacagggtttcaccgtgttggccaggctggtcttgaactgcagggattacaggcgtgagccactatgcctggcctaaaattaattttttaaatcatgctctagtcattgagttattgaaaaccaagtaaaccagttctcttctaaacatttctcaaaaaaaggcaatccagttacgtctgaggaaacctcagtgtggtttcctgtggcttttcacatgggtttgtagtggagggctatatagtctccagaagacactggcacacagacatttgtaattaaaagataactagataatgttgaacaagcctactaaagcaacgtggtctgataggagaatgtttccttataatttgctcactttctattatcttgatgaacaaaatccaaaccaaatcttgcaatttctttccattagccgaggaggaagattttgatttcagtaaagagattatagtgcgggttctaggagtgatacggtgttcatgacattctaagtacaaagaacatttatataaagtactctgagagcaaatgttattagagtactttaaatacatttaaagcatgggttgcatatgttattatgcagctctgcttactaaaatagaatgtgattttatatatataaccaattgtggcagacactgttgccagctcacccgtttcccatgccccatcctcattcccttttcttcctgactaaagaggctagaagagctaaatgcatgttttcccaggcttcattgcagtagaggtggcactgtgacactgttctgcagataagatgtaaacagaagtcagctgggatggtttctgagggtgctatgcttttcctatcagagaggtttgttctagttactattgctgcatgaaaaactatccaaaacacgcatttactgtggcacaaaaggtcaattttattatacccttggatcctgtaggtaagaaattcaggcttggcctggtggctcacacctgtaatcccagcactttgggaggccaaggagggcggaccacttgaggttaggagttcgagaccagcctggccaacatagcaaaaccccctctctactaaaaatacaaaaaaattagccaggcatggtggtttgtgcctgtaatcccagctactcaggaagctgaggcaggagaatgacttgaacccaggaggcaaaggttgcagtgagccaagatagcatcactgcactccagcctgggtgacagagagagattccgtcttaaaaaaaaaaaaaaattcagacagggcacaaggggatggatagcttatcactgctccatagtgtctggaacctcagctggaaaggctcaaatgctcaagtatcatctgaagcaggtctaacagaacttcctccagtgatgggaatatgccatatccgtgctgtcaaatataatagccacatgcggctcttgagcacttgaaatgtggccagtgtgactgaggaactgaatttttactttaatttagttttaatgaaatttagatttaaataatcacatgtggacagcagcttctgaattggacagcatggacctggaagctttttcaaagcacatgtctagcacctgggctgcagtgactcaagggctgggcttagttggcactgttgtttggagcgtttccacatggcctctgaatttcccctgtggtttgggcttcttacagcgtggcagttgagaggaagcagagcagtttctggagagtgaactttttaaaaattaaaaccatttttttcaagttttttctagagatagggtcttgctgtgttgcccaggctggtctcaaactcctggcctcaaacaatcctcctgccttggcctcccaaagcagtgggattacaggcatgagctaccatgcctggccaccatggaagctgccaccatggaagctgccaccaaggaagctgcatggccttttatgacccagtctcataagtcacaatgcaccacttccattacaccctaatggtcaaagtaaccaccagccagattcaaggggaggggacataaccaccacctctcatggaggagtgtcaaagaatttgaggccatttttaaaaatcaccactgggtcacttctctcttcttcctgccttgaacatggatctcatggcaggagctgcagcagctcctactgaataaaccatgaataaaacgcaagttaatcacagggacaggggttctcaccaatgctagtcactgcctaggtctggtccactttttaaccgacattaagtgttccatgacttgcagctgaagtatttccagcaaaaacactaattttacatcttttaaggaaacctgaacttgattttcaaaaaagccaaaataaatttttcctctaatctaaaatatcagggcttctttctcattataaaacctggaaatgctcattatagcaaatttggaacacatagaaataaagaagaaaatagcaatcatctttaatctctccatgcagtgctaaccatcttgctccatttctttctgaatgagtttctatcacacacgcaattttctatcctgcagttcacttaacattacatttttcctattttctcctgacattaagcatttgtcacaatcatcatttttaatgactgcatattatattctactctatggatttagaataatttatttaaccatcgctgggcatctaagttgttgaaaatgtttctgtattaaaaacaaacatatttaacaggcatttttatatgtaaatctttagctacctctctatttccctgagctagattctataagcaaacttagcgagtggaagagaaggaatattttttaaggctggtaacataatgacaatccaccttccagagagattgtacttttttaccttcccagaggatacgcactgcaaaatcactacatttttagccagcgttgcctactaaaaaatttttttctatccttggctaatttggtaggtaaaatgatatctgttgtttaatttttatttctttgattacatgtaggatgaatagagtttgacatgtttgtcagctcgttgtactactgtttttataaattttttatctatgccttttctccatgtttctcttagaggtctttgtgttttgcttcaatttgtatgagtatcttgcatattgtgtacagatacgtggctgaagaggatcctggtcataaacctcactctagaacttgcccaaacattttaaacatgtgattttgatgcctagaaccttgcttttcaatctactgtttcactttataaggtcctgactaactcctgggttatccataaatgcttaaaaaaaaaaaaaaagcaagccaggtacagtggtacctataagcctagcactttgggaggctgagatgggagagaggatcatttgaggccatgaggttgagaccagcctgggcaacatagcgagacccctgtctctacaaaaaaaataaaaatattagtagggtgtagtggcaagcacccgtagtcccagctactaaggaggtttgaggtgggagtatcccttgagcccaggagttccaagcggcaagtgatcattccatagcactccagcctgggtgacagagcaagaccttttctcaaaaacaaacaaacaaacaaaaacagttctaatcatttttacttaggcctctgtcttcttgacctttctgtcacatttcacactgtttactaataactacttcaaatatttccttttgacttttaagactttgcccattgtattaacattggatatcctaacatggcccccacttcctatctcagctgcagtggagcagagaagaaaaattatgaattcaaaattagagaatttgtgtttgggtcttgccacctggtattagttgggtatggctactctgagtctcagccctcatcttataaataattagaagcaataattaccctcagagttgtgtgagaatcaattgaggtgacacctgtgaaaacgctctatgaaccgtcaagccccccataaatgtgaatattttcttccttcctctccccctccctcttcccctccttccctactttctcctcctcctctcctccttctcttccttctctgcttcttacatctggcagaaattcaagtaccatttgattcagctcaagtaaaaatacatgtgaaattgcttttaaactacaaacaagtattattaacactctcttctgtcagatacagtgttgccaactcagtccttttcaccttcaaaaaacctctcagaatcccatggcttgatgttttatattattatttaattattagtttatttagccttccgtgtgtttatgtcctagcctttgttggattccaagctttttaagagcagaaagcatgtacctttacacgagctttatagtgccttgcagtcaatcagtattgactgatggctttgctaggtcgctgcttaatccaatgaaagaacacagaatatttgaggaagggtaagtggctcagagtggctgctgtggatggttcagaggtgagaatctagagaggaggctggttggtaggcagaggccagattaccaagggaggaaatctggaattttgcctttaacagacgggaagatgttgggtgatttttcagttgggaaatgacattattggaattctgtttggagcacattttatttatctctaaatgccccagagcatagtacattacttgatacttaggaattgccctgccaatgtgtgttcaattgctagacgtagttttatcacccaatggaatattcttcaattgtttggttgttctgaagaagaaatacttactgtcttttaaggaagatacagaccccacctggagaccaatacttctatccacttgggaacaaaaggaaaagttttggccgggcgcggtggctcaggcctgtcatcccaacaatttgggagcctgaggtggatgaatcacttgaggccaggagtttgagaccagcctggccaagatggtaaaatcccatctctactaaaaatacaaaaagtagccagctgttgtggtgcgtgcctgtagttccagctacttgggaggctgaggcatgagaattgcttgaacccaggagatggaggttgcagagagccgagatcatgccactgcactacagcctgggtgacagaacgagactctgtcacaaaaaaaaaaaaaaagaaaaagaaaagaaaagaaaaaataaaagattatgtggcaaggtattaagtaaaaaaaacttacggtttctgaaaaaactaaaacctttctgtagaaaattctactgtggtaccaggagggttgattacttccacctttccttgttgttagcctagacaacatctgttcccctttcttccagcaacagttgcgatttttgtgtgagaacctatacctctcccacccttcatccaggagcttctagtgagacttgcgatttttgtgtgagaacctatacctctcccacccttcatccaggagcttccagtgagactcttgacaaggcaaaagccagcgaaagcatcacattctcctaactactgtgatgggtttagggatggctgatcagagccaataactcaattctgggacttctgtctgaggtcttgggataaggactctttcccatgaaatatgaacctggaagtattcattgttgaggctcccagggccatcttagtaccaaaaggagagagcctgtcagagaatgtagctaacccaggtaaaaccaagaaaaaccaagtcctggaaacagccttttgagcagcccttgaatcaactttacctggactttcagctacaggctgtcttagcataggttcctaaacaagcagagcccaaggcaaagggctttgcgctaccactttattttttatttttatttatttatttatttatttatttatttatttatttatttcgctctgtcgcccaggctggagtgcaatcgtgctatctcagctcactgcaacctccgcctcccgggttcaagcgattctcctgcctcagcctcctgagtagctgggattatagtcgcgtgccaccaccccagctaattttgtatttttagtagagatagggttttgccatgttggtcaggctggtcttgaactcccgatctcaggcgatccacctgccttggcctcccaaagtgctcggattacaggtgagagccactgcgcctggccttattttattttattttttttgagatggagtcttactctgtcctcaaccaggctggagtgcagtggtatgatctcagcttactgcaacctccgcctcccaggttcaagggattctcctgcctcagcctccctagtggctgggattacaggttcctgccaccacgcccagctaatttttgtatatttagaagagacggggtttcaccatgttggccaggctggtgtcgaactcctaacctcagtttgctaccactttaagagggagtgaaatcccaggaagcaggagagaggggcaaagagagtaaaacagcaaaggaggagaacctatttcaggttgcgttattaaaccaattgctgttaagtaaaattgcttgattccatggattagtcctccaagaagccctataaactgtatccctttatgtgagaaaagaaaggggagaattcatccattggttcccatctcccactggtcaaataatttatgccatgttgcataactgtattgcatgggtgtgtgtcctgtctctccaagaggcctgcattgtcatgagagcaggccagtagcttctactgccctgtgcctacaccatccacagaatgcttagtaaatatttgactgaactgacttttcataaagttcagcattctgctatttgatcatttgcatcccaatgagttttccccaatttgtgctgttttattaacctgttaaatgttatcatttgagtggtacttacacaatcaattgccagctgatttcacatactcagtggcatttggattctaaagccaaatcattatccttctattctcaatatggttaaaatcaaaaaatgttaaatgacatgtaaactagctccaagagattcgatgttgaccaacacagggattccagaaactaagaatggagagaccaaggggaaggaaataactaaagaactcagagaagaaaaaattgatgtatcagttaagtaataattaaagttttggctaacataattaataaacttgacttggtagatatcggtgttcttataggactttccacatatagacattcttttcaacaacccatggactagttttaaaattgcctgtgtaatatgtaaccaagaaaatttacataaattcccccaaataaaaaccttatgacctatactgttcatagatcattaaagctagaaattaacaacaaatatagcaaaacatctctttacttgcattttttttttcagacagggtctcaccctatgcccaggctggagtgcaatggtgtgatcacaacactggaaggttaaggcaggaggatcgcttgggcccaggacttcgagaccagcctgggcaacatggtgtgaccccgcctttacaaaaatttttaaaaactaaaaaaaccaaacagagcttattaaatgattaagagcatactatgtacaactacattaaatttacaatccttaaggaaaatgtaaatcatctaaattgatttaagaaatagtatcaaacctaaatagaccaccaacaatggaaaaaaactggtttaagatctacctccaaaaaagacacaaagccaaggtggttttacggtaagctctgccaaaaaaattcctgtatttgaattttcagagcttagggaagcatgaaggtcttgaagttcttataaactcactctacgagttggtataacatggataccaaagtggacaatgatttgagcaacaacaacagaagataaaaccaggcacggtggctcacgcctataatcctagcactttgggaggccgagacaggcacatggcttgagctcaggagtttgagaccagcctaggcaacatagcaaaaccctgtctctagaaaaaaaaaaacacaaaaattggctggatgtggtggtgtgcacctgtagtcccagctacttggggagctgaggcaggaggatcacttgaacctggaaggtcaaggttgcagtgagccaagatcacaccattgcacttcagcctaggtaaaaaaatgagacccggtctcaatcaatcaaccaatcaatcaataacgaaagcctaaatttgcttatgaatacagattttaaaatcctaaatgaaatattagcgaattggatgagtgtattaaaagtataatgcaaggatggctcaacattaggatatctgttaatgcaattcactatattaataaaccaaaagggagcaatgaccttttcaactgatgcaaccaaaaaagcatttaacgaaatctaatactctttcatgattaaaaacaaaactctttttttgttttgaaatagagaatgacatgtctttaacttgataaagtatccatcagaaacctacagcaaaggttgtactaatggggaagtgttagaaacttttttttttttttttgagacagattctcactctatcgcccaggctggagtgcagtgttgtgatctcggctcactgcagcctccacctcacaggttcaggcaattctcttgcctcagcctcccaagtagctgggattacaggtgcctgccaaaatggctggctaatttttgtattttagtagagatggggtttcaccatgttggccaggctggtctcgaactcctgacctcaagtaatctgcccacctctgcctcccaaagtgctgggattacgggcgtgagccactgtgcctggcctagaaacatcttaaagtcagtattgagacaagcagggttgataccattgccattagtcagtattgagacaaacagggttggtaccattgccattattaaacaagcctggagtaactagccattttaataagacaagaaaaggaaatatgaggtatacatcataagaggctgaggtgggaggatcacttgagcccgagaggtcaaggctacagtgagctgtgattgccccacttccctcagcctgggtgacagaacgagaccctgtctcaaaataataagaataagaaaaaatatatatatatatattcatatatatataagaatatatatattcatatatataaaagaatatatataaattatatataatttatatataaatatattatatatatattatatataaataatatataatttatatatattatatatatatttatacatataaatatatataaattatatataatttatatataaatatataaattatatattatatattatatatattatatattatatattatatatatataatatatacatattttatatatatatatatatttttttttagacagagtcttgctctgttgcccaagctggagtgcagtggcacaatctcagctcactgcaacctccatctcctgggttcaagcaattcttctgcctcggcctcccaagtagctgggattacaggcatgtaccaccatgcctggctaatttttgcatttttagtagagacgggatttcatcatgttggccaggctggtctcgaactcctgacttcaggtgatctaccccccctcccccagcctcccaaagtggtgggattacaggcatgagccactgcactcggcctagaagaataatattttttaatatggttgaataattttgatgtatcttgtactttgtggctgttggtgagttgaattcatatagatggagaagatactatgtaccaggtattgttcttcctgctttacatttaaatcttcacaaaaaccctatgaagaagataccataattaatgctattttatagatgagggaactgaggcacagtggggtatgcactgggcctcatatgaaagcacacagccagtaagtggcagagctgagatttgaacctcaaccattttgctgtagagcctatggcttaaccacatgatatgatatccttggaagataagaaagccacagaaaaagagtaatctcacctttattaaaagtaggctgagtgcagtggctcatacctgcaatccagcccttggggaggatgagagggagaattgcttgaggccaggagttcgagaccagcctgggcaacacaatgaagccgtgtctctacaaatatttttttttaatccatctggttagatagattgtaagaacaaaaacaagcaaacaaaaaacaggggtggtggcgtgcacttgcagtcacagctacttgggtggctgaggtagaaggatctactgagcccaggaattcaaggttacagtgaagtatgattgcaccactgtactccagcctaggtgacagagcaagaccctgcctctaaaaagaaaaaaagtaggccaggcgcagtggctcactcctgtaatcccaacactttgggaggccgaggcgggcggatcacgaggtcaggagattgagaccatcctggctaacacggtgaaaccccgtctctactaaaaatacaaaaacaaaattagccaggtgtggtggtgggtgcctgtagtcccagctactcgagaggatgaggcgggagaatggcgtgaacccaggaatgggagcttgcagtgagctgagatcgcaccactgcactccagcctgggcgacagaccgagactctgtctcaaaaaaaaaaaaaaaaagaaaaagaaagaaagtagaaaacatgttttggtgcataggagaaagtagttacatttagcgaggtgtagctctgcgggtgagtgaagggacacttcacttttgactcctctcttcatatgttgcttggattttccacagtggtcagttacctttgcaattaaaaagaaatgttttttgttttgttttttgtttttgagacaaggtctcactctgtcacccaggctggagtgcagtggcatgatcatggctcactgcagcctcagtctcctggactcaagtgatcctcctgcctcagcctcgtgagtaactgggactagaggtaagtctagtcctccatgcctggctaattttttttttttctatattgctcaggctggtttgaactcttgggctcgagcaatcctcccatcttggtctcccaaagtgctgagattataggtgtgagccaccatacctggcctaaaataaaatattaaatacattttaacatttattatatttatatattatacatactttttgtacaatttgaatatatacatatatcatctttatatttggggctcacttctttgtttatgtagtgtttgtttccaaaagcttcctttattatctctcacaaaaatgagaacagaatgcacacaccacacctatctgccctacattccaaaagcattaatttatcacattggaagagatctgttttttttttttcactagacctcttctgtgaacagagatctgatttttgtgcattctgaaatacctatttattataagaactctgtaaatggttggctaaaatggctttaattcaatcctaacatactccctaatagagagttagcccttttgtcctgtttccctgcgtctggattcccattccataagcatcgctcacaggactactctactgggtgcaggagaataggaggctgagtaagccccaggctagtgggacagacacttcccaagccagaaacccaggagtcttctgagacacccccttttgctcactctgtccctaatttcaagctgccactggacccatccgcctgacctcctacctattgatcttgtccgttcgccaccctgcaggccatgagcacctcctccctggaccaccacgccagccgcctactggtttccctgccttgactcctgccttcattgctaacaccttctccaccccacaaacaagggatggatcttttaaaaatgcaaatcaagcctaggcaacgtagcaggatcctgtctctacaaaaaaaaaaaaaaaaaaaaaaaaaaaaaaaaatatatatatatatatatatatatatatatatatatatatatatatatatataaataaattagccagctgtggtggcgtgcacctgtagttccaggtaattggaaggctgaggcaggaggaccacttaagcccaggggtttgaggcttcagtgagctatgatcgcaccactgcactccagcttgggagacagaggaagactctgtattagaaaaaaaaaaaaaatgcagtccaggcgcggtggctcatgcctgtaatcccagcactttgggaggctgaggtgggcggatcacttgaggttaggagtttgaggccagcctggccaacatggtgaaaccctgtctctactgaaaatacaaaaattagccaggtatggtggtgcacgcctgtagtcccagctactcaggaggctgatgcacgagaattgcttgaacccgggaggcagatgttgcagtgagccaagatggtgccactgcactccagcctgggcaatagagcgagactccttctcaaaaaaaaaaaaaaatgcaaatcagtcatgttcccgtcaccctgcacccactggggtaaacctatcagtgtctcccatgacttttagggtgaggaccaaagccctcactgcagtctacagaccctcgaggatctgctgcctgcctgcctacccagcagaaggccagagcttgcccaaccttcctccaccctctcttacttcctcaaatacaccaggttccctcccacttcagggccttctgctagtcctgcctgcagcctctcacttactcctctcacctcattcatccctagtgagcttagcatttggcttttatttcccttcttcaggggaagctgccccagtcctattacagcaaaccctcagctttttgctcccatagttcctatgcagctatttattcagtagctgtctccaccgctgagcaatgcagtcgaaagggataggatctgtgtctactttgttccttgcagtatcctgggaccccagcacagagcctggttcatacaggacttaatgaatgagtgagtgaatgaatgaatgagtgatcctgctgtattaccagacagatcgtggtaggggcaacagttgctgtgaggttttgggaagctgtctttgcctgggaggtggggaaggcagggcagagcctaaagaagccttgaagggagagtgttgcttcatgggcagggaaaggaaaatgacattccagactcagcccctacacaagtgtgaggcagactcccatggttgtcaggtcagagtagggagaggcagagataaggctgcgattgtgggtgagctcagcctgggaggagctctgcataccaaaataaggactgaaccttgtgtaggtagtgggggaacctgggaaagtgtgttaggcaatctttccccacccccttcctctttccacctctcccctgctttccttcctcctggagatagggagcaaggtctccaggggccaggcaggtgcttctggttggaaaggccgtgaccaggacttgttgggtccatttgactcaacggacccctttcttggccctgtccccagatgtatagggcagagctagagttgtagaaaagggagacacactcctcagggccaccacactcacccagcaggggtctgggagcccctgaagcacccgggaccccagcctcaaaggtggatgctggagggaggatttgagggagcaggcacccatcagtgagaatgacgagttgacggcacagctgacaagtgtctgggggtgtgccacctccctgcgctgcttctgagctgtttgctttgccttggtacacttgaggggttggaagtcctcagccttcagagctccaggtttgaggcacagacaggttccattttgcccaaagccaggcaaaggctcctctctctgagcagaggttgctgggtcacaggagctcagggtggcactgcactcaggattcgcagctgccttgacgtcaccagtgtcccaggtgaaggcacaaactcctggcctgaggtgaggctgagggagacaagagcccaccagactaggccagcacttcccatgggcttagacccctgctctcctgcctcctctgatatttcaaatctttcagaatttcaaaaccataggacctattgacttctaagctccccaccctgctctttgggcttaaattgtgctttatctcaacagcattcattgagtgccagctctgtgcaaagccctgtgctaatgtgctaggctctagagtcataaagatgaaaatttttctttttttaaaatagagaatagtcagtctcactttgttgcccaggctggtctcgaactcctggcttcaactgatcctcccatattggcctcccaaatactgggattataggtgtgaggcaccttgcccagccaatgaatactttatgatatgatccctgttttcaagagacttacagtctagttagggaaatggacacaaacagaccctttcagaacaatgtaaagacctcagaagaggtcaaattctattggaatccatctgcttttttttttttttttttttttttttttgagatggagtcccactctgttacccaggctgaagtgcagtggcaccatctcggctcactttaacctccacctctgggttcaagtgattctcctgcctcagcctccccagtagctgggactacaggcgcgtgccaccatgcccagctaatttttgtatttttagtaaagaaagggtttcaccatgttggccaggctggtctcaaactcctgaccgtaagtgatctacccgcctcggcctcccaaagtgctgggattacaggtgtgactttttactatctgtaggtaactgctatatataatgcatgatctataatgcccgacccaacattttgtcatctttgcaatacttgattttattttttttcctgtaatattttggggtttgagattatttcgtttggtttggctacaaggaagcctagatgtgcttcagagtcgccttgaaatttcttctgcattatcaaccagctcaatctcctctgaattagacctgccttctcatctgggaaaggcagatctttaacaggtggctggaagctattgaaggaagaagccaagatgtggtttctgaagagcaggcaggagggtccctggccataaatatgtccttgataagggcctgaaatcccattcttagaattttatttttttgaagttgcacgagcacctgggaagaataccaccttaaatcctgaccacttatccactccgggaagatttgtttatagccaagagttcccacgatgggccgaggaagagcaggggggcagccagctttccaggcaggccctaacatattatccagattttgaggttgttttagttatgtgtttgtaacaaaccaccacaaaacataatggcttaaaacaatgatttattgtttctcacaatgctgtgcgttggctagttcgacagttctattggtctcacctggggtcactcagatggctacagtcattgtagattaactgaacttcatcaatgtgcagtggtctcaaggttatgagaaggtgatcacagaagcaggaagacccgtgatcgggtgtggtggctcacgcctgtaatctcagcactttgggaggccgaggtgggtggatcacttgaggtcaggagttttccactttcttgtgcccttctgcttaaacaacctttgtgcttcagcaaagtaagcacaagtccaataaaatgtagcttgaaaacaagtatcaacaaattaatgaaaacaacacacaaagggcagccttgtcttgccatgggaggagaagatgcttgtttttaaggaaaggtcttgtcatttaggatgaatatgaaaggagggtcagggagaagagcacctgcagaccaagacaaatggagaattgaagggaaaaaaccctgtaaaacaaaaagtgctggtgatgctgactcctgcctcagctcagagctgtgttaagggctgaatgggacaagctggagccccaatggggagatttctttttcaggccaggctgacccataggggccatcacccaatcacttggaagtgaaaccagtttagcccagccttcgtacttttcttgaagcagtctgtattttctgcgttacttctagctccctgggtgtgtgtgacctcttccttgtcacactgaaacctctttgagggaggtgtgggggaggggggagcggagcttgcagtgagccgagatcgtgccactgcactccagcctgggtgacagagtgagactgtgtctcaaaataataataataaataaaaaaaaaaattcaaagcaacaaatatattgcaaatgagctttactagtttttttggggaggggtgaacatggagagttgggaggaggaaggaaataaaaaaatgaaaagatgatctgaatatatccctgccttagagagcttccaggtaagtccaagagactgacttcaacacagacctgggctaattgcccatttcgctccttgccctggggcctattgttttccacaaattgcgtccccacttgagactcagtcttctctccctcatcgccatgcagtcatttcagcccagttgcagaacaggagaacatgaatggaaaaaggattgagtccacactgtggtggctgcaagaggtgattcaagatctaacattctgagtagtttccagacagttgaggacagcccaggctggggtccagaggtggggatcaggcaggaggagcaggagcagccagaaggcaggatcagccaaagcccttgaagaatgccaaagggcaaactgcagaaagcgagttcaggtgtcagatcccaaaggcgagaggagggctgtaagtgggagatgacccagggggccctggaatggagtgggagcaggttgggccagaagtgggaaagctatcaccctcactagtgactgggagaattcccagaaggacagcaaaggtgcccactgtgatggcgtggatgggctaggtcagcacaggtgctcaggccaggacagatacttcgtccctggccacccagccttggccatggtcctcacaaccaagccccacaaggtagccccaagcctgggcagaggagccctgggcatgaatgcatcctaaactctacccatcagcgctgatccatgacaaagtttttgtccatcagctacaaactggaaacaacaacaacaacaaaacataagtgagcttttaataacgttaatttttgtttctagtttaaattctgatatgatggctgttttacttttggtgataagatggcttttcttttatgaagacatggtgatgggaggtgatagggctttttttggttgtttgaattgcctcactaggtcgggagcagtgagtggctcatgcctgtaatcctagtatttttgggaagccaaggtggatagatcacctgaggtcaggagttcgagaccagcctggccaacatactgataccccatctctactaaaacacaaaaattagccaggcatggtggcacgtacctgtaatcccacctacttgggaggctaaggcaggagaatcgcttgaacctgggaggtaaaggttgcagtgagctgagattgtgccattgtactccagcctgggtgacagagatggtgtctccaagaaaaaaaggaattgcctcacttggctaaatttaaagttgacaatattggttcccagatttgaggaaatttttttctctttttttctttttgagacggagtctcactctgtcacccaggctggagtgcagtagcacaatctcagttcactgcaacttctgcctcccaggttcaagcaattctcctacctcagcctcctgagtagctgggattacatgtgtgcgccaccacacctggctaatttttgtatttttagtagagacagcgtttctccatgttggtcaggctggtttcaaaatcctgacctcaagtgatctgcctgcctcggcctcccaaagtgctgggattaaaggcgtgagccaccgcatcctgcccaaaaaattttgataaagcatcaaatcccagtctggtcacctctgctctaagaaactaagaaatcctgtccctgaaacccagatcctggctgccaaaataacaccatcatccttgccatcagccaccacaagggcacttacagggcatgcactttgagccaagctcaatctaagcctttgcatgtgctaatgaactccttccctgttttgacctcttgcccacttactgtctgccagatttctggatttggccctcccagctctgagctctgacagatcccactgaataccagttccaatggctcccttgctacaggtttctgcaggtcgtatcatgagattagttgctatcttaaatggaagctcatgaaagtgcttctccgctaaggtagaaggaaactccatttcgaactctctctgtcactgctgctaaatgtcccttttcccaatgctgctgggaatctgacccatggacttctacaaaccttcagcaaatatgtgttccctggactctggctgcctacctggaggctgactttgcctggaactttgcaggcacctctccttcagagctctcatacctactaacacccaattacatccttcattctttcctagctttatccaaatgacagtcaagctgcctggggctaagggggatgatctctgagtcctgcatatagatggtgtatgagatttaaagaaggtgtgattttaaaaaaagtgtgatttgagggacgctatttattttattttacataaaaaagaagaaccaggatgctgaaaatgatgctattgattataaataggaagaaaacgctagtcggttgaaatagccagtatggtcttggtcattcataaggaaagaatggcccctgtcctgggagctggctttagaagaacccactgtggcagaactggtcaaatcctccaccacctagtacctataggctttcaatttcctgccaataaggcaccaaggtctgcctgagacttgacatctaaaaaactcctaattggccaggtgcggtggctcatgcctgtaatcccaacactttgggaggctgaggcaggcagatcacttgaggccagaagttcaaaaccagcctggccaacatggagaaacccatctctactaaaaatacaaaaattatccaggcatggtggctggcgcccataatcccagctactcaggtggctgaggctcaagaatccctcgaacccgggaggcggaggttgcagtgagccgagattgagccactgtactccagcctaggcgacagagtgagactccgtctcaataaataaataaatacatcaatagcccacgattaagccaggcatgctggcccatgcctgttgtcccagctactcaggagactgaggcagggtaatccctcgcgcccaggagttcaaggctgcagtgcacaatgattatgcctgtaaacagccccggcactccagcctgtgcaaatagcaagacctcatctctaaaaaaataagataaaagccaaaatgcccactatctgactcaccaaaaggtgtgtatttaaggcgttgtctgcagtgcctggctgaacctactgaagcctgaggaaaaaggaaaaatcaataatacaggttctgtcttcattgaaaagtttgatattttgcgtctcatggattttttgcactaatttggatgttgaaaatattgcattaaaatattatttatctagagtattgggtgttttaggcactcccttaaattttgtgcctaaggtgagtgcctcactctcctggtcatagtcctggcgcagtgatgtctacaaagactaataagatttacctgttaccaagctcctactctaataaacatacttagctcattagattagctagttgataccagcccgatcagctcacataattgcttccctggcccttgtttatccagaaagtagagtcctgcctcaaatttcctagccagtggtcatgtctgtactctttgctgccaaaccctttccagaccctcatactgactgcctggttgggcccctaccgacactgtcgaccctctgaacattgtgcacaaccctaggaaggagcactaggtgctgcctaactctggatccccgacactaactccctggcccaactggactctttctcatttatctgtgtctgagtctcctgggcctcattccaccctcccagaagttcttcctttactgcttgcctcctggtcaggtcttccctgaaaaaataccccacctgtgtgtgaatctttctggtttctgggtctcgtgcctcccctaagcaatgcaaaccttgagtcaagtactacgctcttgccccaggcctggcattgttacgttaataaccattgagagcataccatgtgccactgacccatgctttccttgtgttaacccacatgcacctcatcgtaaccttatgagtagatactattgtcatctccattttacaaatgagcaaaccaaagcccagagaggcaaagttatttgcccaaggtcacacagctaagaagtggcagaaatgggctacaaacacagtttctagagcccaactcttaactatcatgttacctagcttctgcttacagtctaagaagccctgcgtggaaagtttggaatcagatgagtctcaaattcaaatcccagatgttcagtttatgagcttcatggctgtggggtgtcactttagttctcctggtctcagctccctcatcttgcatggctttgtaagaagtgacattaggccctcagtacacagtagacacaaccatcacccccaacctttcctgcaggataaccctagcaaccacaaacatgctgtgagcagggcctaaggcacttaattccacactctggaaatgtcagtaaccgttgaaaagaataaagccagttctatttgtaaagcattttactgccgatggaggaggtgaagtgcatgttgcgtttgaaggtttgcagcatgaactctagaggtcagctaccgaagctgaagcctggattccacaatcgtgtgtgactttgggcaagtttctttctcttttttcttcctttttttttttttttttttttttttcggagacggagtcttgctctgtctcccaggctggagtgcagtggcacaatcatggctcactgcagccttgacctcccagattcaagagatcctcctacctcagcctcccaagtaggtgggactataggcgtgcacaatcacacctggctaagttttttttttttttttttccagcgataggggtcttgctatgttgccagggttggtcttaaactcctgggctcaagtgatctccccagctcggcttcccaaagtgctgggattacaggcatgagccaacgtgcctggcctgggcaagtttcttaaattccctatagcttagttatctcatctttaaccgagggacaataataataacaataataataataataataataatcatagcacctaccttgcatagggttgttgctgattatagagttaatacacatgtaacacccttagaatagtgccctgaacacaccgtgagctcttcaaagtgtaaaccgattggtctctaagataaggggaactggtatgtcaccaccattttgcagtccaggaaacaaagacactgaggggttgaaggatttgctcaatagccctcagcttttgcagagtggaccccaaattgaaattcagaacctctggttagagggttgctggctcctccatttcatccaggagtttcttatttccatttctgacatgactgcgattggctctgattcccaagccacgggtttccaaccttattaatgcgctcctgcaaaagccaggctcctcctcacaggctctgctgctgttcggagcaggcccgggctgctgtgtacctcacagctccccgacagagtgctgcacaatgacgaccttcggtggggcagacattcgcctccatcaggcgcctaattatgcaaaccctgaacatgagactgaagaggagactggcctgcccagggacgattgatgaggctggctggtttcatcttccccattgtgtaggccagaggcttcatgatgggagcggctcagctgcgggatctcggttgctttgttgcaggcgctggggcaacgaagggtgaactgggttaataaaatgtgctggtgactcactcctaggaaagaacctgtgatggatcattaagctgtctcggaacttatttcaggcccacacccgcaagatgaacgctctcaatttgtttattaggtctccaacaataggccactgttctccttccccacaactcagttacacaatctttcccctcgtgtctttcagccacctactgaaaatctgtctgtgtgccgagcacgcgctccccatccctctaccaaatgcctggctggcgcgtcatccctggctttgatgggtacgttcacttccctagcgctggcttcccctaagatggggggacttaccctcctgcctgagccctcatgctggcagatttggttctttccatctccctctccgctgaagtcttctcaccctcactgactccatgctggatctagacctctgaatggtccatcctagtgcctgtcctggctctcccaattcccctttaatccaaaggtcttgggttgatcctttttaaaaagaaattattttattctttaaaactatatataaataattcatgttttttttttttttttttttttttttttttgttttttgagacggagtctcgctctgtcgcccaggctggagtgcagtggcgggatctcggctcactgcaagctccgcctcccgggttcacgccattctcctgcctcagcctcccgagtagctgggactacaggcgcccgccactacgcccggctaattttttgtatttttagtagagacggggtttcaccgttttagccgggatggtctcgatctcctgacctcgtgatccgcccgcctcggcctcccaaagtgctgggattacaggcgtgagccaccgcgcccggccataattcatgtttactatggaaaaaagaaatcacttataatcttgccactcagaaataatctctgttaacatttttgtggtggggcatggtggctcatgcctgtaatcccagaattttgggaggccaaggtgggaggattgcttgagcccaggacttcaagaccagcctgggcaacaaaatgagactccatctcttcaaaaaataaaataaaaaataagccaggcatggtggtgtgcgcctgtggtcccagctactcaggaggctgaggtgggaggattgcttgagcctaggaggtcaaggctgcagtgagctgtaatcgcgccactgcattccagcctaggtaacagagcaagacctggtttcaaacaacaacaacaacaaaagcacgtttttagggtataatctcttggacctcccctcattccagaatttacctctgtgcccatctttgctgggacacttctgataggtgcccccgtggtgtactggaagtatgcaaatgccacttcaactagtttttttcttctaaagtcagtaagataggtacccggcaaatgtcacttcttagtgagcatctactgcaggataagatgtatttgccagcttgcatgtggatctagattgtggaatcaccttccttgtggcctctgcacatctacaaatgagaatgtcttgcctgcatttttggaatagcctccttctagttacgtggcctccagagtgagcagaacaagacgctaacacatcggatcactcctccgattgcaaccttccgtggctttgcgtcctgatttgggacagactcgggccacccgcctcctgtgtctcttcaggacgcgaggcttgtttgcctttccagtttcttcgcttgcctccttactgggggtgttcatgctgtagcctcatcagacaatttgctcttcctagaatgggatgactctttgcacctaaggatcgttgtacgggctgctccagctgcctggagtcagttttccttccccgtttcttgtctgactagtattcctactcttccttcaaggcttagtccaaatatcatctcccctaactaccctgccccatcttgtctactgtcacttatgcgcgtctcctctgtggagacgtaacaggccactgctagactttgactcattaaaaatctgtcatctgtctccctcaccacactatgagctacctgagggcagatattgtattttttctttatttagacagggtctcgctctgtcacccgggctggagtgcagtggcacaatcacggctcactgcagcctcaacctcctgggctcaagtgatcctcctacctcagcctcccaagtagctgggattacagtcacacagcaccgcgcccagataatttttttattttttgtagagacaggatttcgtcatgttgcccaggctggcctaaaactcatgggctcaagcgatccacccatcttggcctcccaaagtgctgcgattataggcgtgagccaccatccctagctaatttttgcattttttgtagagacagggtctcaccatcttgcccaggctggtcttgaattcctgggctcaagcaatttacctgcctcggcctctcaaagtgctaggattacaggcgtgagccaccactagggattgtattttttaacacttttttttcttcagccagtcacaaaaaatctggcccacaatgcatattgagttcaagaggatttctttttaactgactagaataaaggaataaaaactatacctatagctgctcaatgttattgttgcttcagaggtaagcatttttattagatccaggtacagaataaatttcaaaattgactcggacaacaagtttgtacacacctatgatcttaatgctttacattatgtaaattacctcatgtgaattacttaatttaatcccatctcaacctcacaacagccgcatgagatgagagtaattttaagttatagattagccagactcagggatatatcaggatcttacaaatagcaaataataggaccagaatttgaaccaaaatcaaaattatgatcattttctaaaccaaaatgattaggattcaattgtctttaaagttttctggggccaggcacagtggctcaccctgggaggccgaggccggtggatcccttgagctcaggagttcgagatcagcctgagcagcatagagagagccccgcctctacaaaaatatacaaaaattggccgtgtgtggtggcacagacctgtattctcagctacttgggggactgaggtgggaggatcacttgagttggggaggctgcagtgagctgagactgagccactgccctccagcctgggtgacagagtgagactctgtctcaaaaataaataggtaaataaataaataaataaataaagatttttggatgcagaaatttgtttccaaaagcaatatccctaaacctggccccttagtcgcctggttcctcataatttagcagctgaataatcacgggttcacatccttctcaaagggtactgggtgtggtggcacattcctataatcgcagctactcaggaggctgagacgggatgattgcttgagcccaggagttcgtgcccagctgggcaacacagtaagaccctgtctcttaaaaaaacgtaactaggggacttatgaccaaatcttttcccttccttcatctcaactatgataaactttctccagtcatctttcctcaactgaacattttctgcataacttggaaaagtggtagattgttacccacaaacaaaggactgctcatccaggtagtatatggggtgcactgatgtcttgaagatcttaacagaaggactctgatactggatgttctttatgtgtagaaaagtgccttgttctacttaaagttctcattcactcaaaaacatttacagaggagttaataatcacagataataacagtagctaacgtttattgagggcttagtatgtgagaggcactgctctacctgccttatgaatagtaactcatttaatcctcaacaaccctcaggcaggaactattgttaagacagtctatagatgagcaaactgagacagagaaggcaagtaacttgcccaaggccacggagcctatggtatattgcctgtccctccatgcacagggctctcagccagcttagggtagatgacacaggccccgccctcatggagcctaattgctcatgtgagagagacatggaacaaggaacttcggtacttggtgctggggacacatacaaggtgataagaggtataagaaagaaatgttgggccgggtgtggtggctcacacctgtaatcccagcactttgggaggctgaggagggcagatttcttgaggtcatgagttcgagaccagcctggccaacatggtgaaaccccatctctaataaaaatacaaaaaattagctgggtatggtagcacacacctgtagtcctagctactcaggaggctgaggcaggagaatcgcttgaacctgggaggcagaggttgcagtgagccgagattgcaccactgcactccagcctgggtgacagagtgagactccatctcaaaaaaaaaaaaaaaaaaaagttggactgctggactgctagctgatgacttcagaggatcagagggggtgacattttagctggatcctaaaggataagtaggagttcagtaggctgacaagggtggggtttgttgcacagagtaacctttgcgaagaggataaaacatgtaaaatgtggaggtggaagaagagtaacttacttgaagaacagtgagaatttctgagtgattggctcccagggtccacaggggaagcagcaggaagaagcctggaaaagcaggttgggccaaatcatggaggggctaaaggaactgtacattagttggtgagaaaggaagacttactggagatatttaaacagaggagcagcatgattacatttgtgttatacttatgagcaatggggaagatggacaggtaggtgagagtttaaaaaggaaaccagaaaatcaatcaaaaggcagttggaggctcacacctgtaatcccaacacctgggaaggccaaggcaggaggatcgctggggtccaggaatttgagaccagactgggcaacatagtgagaccccatctctaaaaaaaaaaagttaacctggtatggtggtgcatgcctgtggtcccagctactcaggaggctgagatgggaggatcgcttacgcctgggaggtcgaggttacagtgagccatgatcacaccagtgaattccagcctgggtgacagagcaagagcctatctcaaaaataaataaataaataaataaataaataaataaataaataaaagacagttagaattagctaagaaacacatagtcccccaaggaaggaattggtgggcaaagtattttaagaagcagaatcaataaaactcagtgaccctaaagcttctcacctgggcctgtgtgaatggggaggacattaaccttggcagggaataaaggaggaagggctcatttgttcatctatttgttcaacagacactttgtcagagcacaggaacctgcctcaggtactggggctacagcggcgattcagacacaggcctgctctcacagagctcatagcctcatgggcaaggcagacaagtaaacacactgattacaaggcaaagtagtgtgtgggccgccccctgagtcagagtctgatggtgacatcttgacatctcaccctcgctggcatggccagccctagaggcagcactggttcctctggtcactctgccaccccctcactgaagaggtccactctggcttccccagggcacaggggaagagcctgatgtggacatttggtgacggcagaactggagccagggcacagcttctatgaaggcagggcagaaactgggcctcccagtgggtgagccacgtcagtgcccatctgggaaatccaagagccaaatgctggtagaactggatagaaacccctaatcaaggctgtggggggaacagagccaagagtttatttttaatttatttttatttttttagagacagggtctcaccctgttgcccaggtttaagcacagtggtacaatcgcagctcactgcagcctcaaattcccaggctcaagcgatcttcccacctcagcctcctaagtagctgggactacaggtgtgcaccaccacactcagctagtttttaaatttttttgtagagacagagtctccctacgttgcccaggctggtcttgaattcctgggctcaagcgatcctcccagctccgcctcccagagtgctgggatcagaggcatgagccaccgtgctcaaccaagaaccaagagtttaaagctgggcagatatgagacaagaacaagccagaatatccagggatgattatcctaaaccccagggaactcgctgttttctctgatggctggtatgcgcatggtactcgggttataggggctggcaaagagggtcagaagtagccctctaaccagtgcactggtttctacatgctgcagagaagtggcccagtcatcacatccttttccatcctcccagataacccgcatcagttcatctgggtgtgctgtggattgcaaggcatgaagattgactatctgtaattgtttctgcaggaggcaagctgcaggagacggagggaggtagagcgaggggccaagtacacagagagcagggcctgtgaggagaggattgtcccccactctccctctccagtttcctctctttagaaagaaaaaggaatggacagggtcagcagaatctggaggctgcgttgaagctgcccgtgcttctgaacgaagcagccagtgccgctcgaccatctgggacaccggtggaattcagggcccctctcaggacattcagggcatgtggacaaggtcagccacagggtgagggagatgggtagagaaaaagataacaggaaatgaataagaaagggagctgcaaagagaaaaaagagagctggagaggagtaaagaggtgaaggccctgtttcctgtccttggattcttacagctctgctcacagcagcttcatttcacacagtggcaccgacaactgatgtgaccgcttggggaggcagtagtggcgggagaaggctgggttggggaccaactgggtatggcatgagtttctgaacctggagaacctgaagcctgatgatccctgatgggagatgacaacaggtggactgagccactgaggggagggaggcgagctgggaggggaggggggggttccacggcaagcatgtgaatgaggacactggtggctggagtcctgggagcaccgcagtctccttttggggttgatcggagcccttggcagcttgggcagcagccattcattgctgtcttcattttattaactttaatttgtaactgggttgatcagcaactgttcttcctggagggtgtaattagggttataaataaagtcaagtggagagtttggacaaccaagggctgtgcattctgtgctatactgagcccggggccccccacgacaccctccctggaggacgccattttccagcaataggtttgttgcctcattgactcaaagggaaggctgaagtcgcacagaacctcatacttcatgatttggaaggagtcagcgttggcaaccttgatcttctagaaaccagccatttggggtatttcctggtggagcctttttaatttagagcccacagcattcaattgatcccagatgtcccagctcttccttgaaccatccaggtatagtgcatgctcctccccacctaccccatccaggctggacccaaggtctctcagatctgactgcttctctccacccctactgcccaggctttagttcaaggacaactcagtttccctctggattattccttggtcctcctggtctcccatggccctctcactgtctccaaagtaaccatcctaaagtacaaatatctccttgttacagcactccaggacaaccccaaacagccagcccctcacatctcttgcctttgcacatgcagtttccttctctttgaatttgtgtctctctcttgcccttacacgtccatcattgcttggtctgaaattggtcctctactctcttaaatcctgtgtgtcagtgtcattctggatttgcagatgcattttggacagggatcgtatctctgaattttttttctctaaggtctatcccagataaggcccatatatagatgttctaggtgataaggttctaaatgttctatgtgataaagctgctgctgtatatgtggctaagtgttgaaaccaacactctccaataaaactttacgtggcgatggaaatgtcccatatctgccatgtccaatatggtagccactaacaacatgtggcgattgagcatttcaaatatgactattgcagtgaaggaactaaattcatggtattgaattttaacttaagtaatttaaattcaaatagccacatctggctagtggctaccatattggacagcacaggtttggcttaagccaacttggaataagggttagttaacaagacttcctgcctgtatcaaattcagcacctcacagctatttttcaatctttgaataaaataaatagcagtaacaacaatatttaatccaggattaaatattgttttgatagctcagactggggcaatgtcacaggcttatcatcccaggcaaacttttgatagtccagggcaatttcatctgtttaaaacatgctgaggctggcggtatcttgccagcaaatgccttctaaagaaggtggaacatggccgggtgtggtggctcatgccttgtaatcccagcactttgggaggctgaagcaggtggatcacttgaggtcaggagtttgagactagcctggccaacatggtgaaaccccatctctactaaaaatgcaaaaattacctgggtatggtggtgcatgcctgtagtcccagctacttgggaggctgagccaggagaatcacttgaacctgggagccagaggttgcagtgcactgagatagcacagctgcaactgcaccccagcctgggtgatagagtgaggccctgtctcaaaaaaaaaaaaaaaagaagaggaagaaggtggagcatgatgaacccagctaagtgagctgctccaggcatgagtagtggtattccccaagcaggggagaatggtttcttaggtatcctgaaatgtgagagaaattatatcccgagagtcttacagggaagatctgaatttatcctaaaaaggttatttattggcccagccctaaaaactttaaaacaggggtagaaataggactagttcagcagatgtgcagtgccaggctgttaggtttccttaactcttgctccaagggtagatcctttcttctgcctgtactttcttggcaattagcaatgtgtctgaatacaaaaagaaagcttaatcctttctttctgggcagctgcatcctttgagttacggaagcccggagctctctggtgactgatggcaaggtggaacaatgggtcagacagggaggtgagagcaggggtaggacactgacagcaaaaatacaaagttctccagctccagtgcctaccccagttatcagcctgtgctaatgaaaagtgacgactcaggaaaagaaactctcagctgccttggcctctagaagaaatggttttgatgggggtcggggagcagcaggctggggaataggatgaggctgccagcatggcagtagctctgtttaaaaacacccttggccaggcgcgtggctcacgtctgtaaccccagcactttgggaggctgaggtgtgtcaatcacctgaggagttcgagaccagcctgaccaatatggtgaaaccccatctctactaaaaatacaaaaattaaccgggcgtggtggcatgtacccggcactcaggaggctgagacaggagaattgcttgaacctgggaggcagaggtttcagtgagccgagatcgcatcactgcactccagcctaagccacagagcgagattccgtctaaaaaacaaacaaacaaaaaaaaaacaaaacaaaaacaaaaacactctcacaggatgggaagagctaacaaaaggaaaataattatagcattttagccaacactgtatctgcttaaactcacatataaatagatccttaagcccttctctactcggcatagccactttaacctcatccatgagcagggactttgagggggcaggagaatgttttctggtgaagcaaagaaccgcccccacaaccaaagcaccacacaaacttacgaaaaaaacaaacaacaacaacaacaccaaaaaaacaaacaaaccctgctcagtccctggggaagagaaaaggccaggatatggaacagggagggaagggctgcattcaaaatcccgtcctacccatacattgtaaaatggtacaaccactttaggaaacagttgggtggtttctttaaaagtgaaacatacacttaccatgtgacccagcaatccctcttctagttactaatgcgagagaaatgaacacatgcatccacatgatgatttatatacaaatgttcataactgctttactcataatagctgccaactggaaacaacccagatgtccaaacacaggtgaatggctacacaaactataacatatccatataatggaatatattactctgcaataacaaggaaagaactatgatagacgcaacaatatgaacgaatcttgaaatcattaggctgagggggaaaagtcagaggtaagagtagagtagaaactgtatggtaacgtatacaaaacatgcaaatctgatctgtcatgacagaaagcagattggtgcttgcctggggccagggaaggggcatgactgactcagaaggggccacagggaacctttcagggtaacggaaatgttctctactttggttattgtggtaggtatgcaaacatacaacagtgcacctaaaatgggcacattttgttgtgcgtaagttagacctcaacaaagttgacttaagaaataattccttcccgagagcctggcctacgaggtgcgggcaagcagagaggcctccctcaaggcactggcgatactgccaagctggaaaaacggctcgctggcagcctggaaaaggccgttctctggctcttgatccttaaaaggctggaatttctggctgaacaagaaggcctgggcccagtccccagggggcagcttctcctcagctctgggcagggtgcccggccacccctcacacaggtgctggcttgctgcccaaacacaggaccagggggcctgggcaggcccccacagccctgctgggggaagaggaggagaccagcccgtagccagcccagcctcagccccagcagcctgtggctggcagggcctctgcctacacagcaagctctcagagtggggggatgggagcagcgcccaggcacccacccagctcccccaacccagagtgtcaccggggacctttaccctgaatggggatggttttaacagcccctagagagggtcagggcatctgtgacaggacagggtctgagccccggactttcacctctcagcccagtgcccttttccccgcagcagcctaagctcccagtgattctctgggggagggatttctgatggggctggttctaaagaaaagctctccagggcagggcctgtgaaacccaaggactgactgctgcgggggctggatagcctttggggacagaggaggggagagggtggcagaacctaaacagctgcggccgctgctttgtccaagggcaacccagcctcccaggtgtggccatcacctctgcctctgacctgagtctcagaccagagccagctgaggcctgggtgctcccttcagccccttctggttctgcaattcaaggcccagttaaccccctgtggggtcatagagaagcttgcagagggtgaagcctgggacctgattctgctcaccctggactctggcccagccagtgccttctggcaacagggaccctctggggtcccaggagccctggaacctcctctgctccctctggctctgtctcctgccccacccccttccctgttgccacctgcacctgtttttccagccttgctcaatctctccaatccacaggctgtttgttcccaggggtcgcctccccttatctcccaggcagctgttggccatggcctgaaggtacagaattcattgttaactcttcagcttccctcacacactccacccccaaaaaccatagcagcaaagagcaccagggagggcccaggtttggggtctggggtctggccctccctgctgtgtgaccttgcctcattgtgtgaccttgagctggtcacttacccgctacacttctgttttctcattggtaaaatgagagcattttacctttttattacctcagctctgtacctcttcccccgccacacacacacacactcacaaactctttctctctctctgtctctctgttcttaaaatgtagggctatcaagtaacactcatccaataattattaattcaggagctgattttttttttccagacagtctcgctcttgtcccccaggctggagtgcagtggctcgatcttggctcacctctgcctcccaggttcaagcaattctcctgcctcagcctcccaagtagctgggattacaggcacctgccactacgcccggctaatttttgtatttttagtaaagatggggttttcccatgttggccaggctggtctcaaactcctgacctcgtgatctgcctacctcggcctcccaaagtgctgggattacaggcatgagccaccatgcccggccaggagctgattttgtatgaagcaaaactaatcagagcttctgagcagcatgtcctggttttgtttcatacaaaacagaatcctgaatgagtaattactgaataaatgtacatttatcatgtccctcataattccagcaatgaaacttgacattttagttaagccagtgtacccttctcacagataaatattctattttctgttaggattttataaagataaaaaacagcaacaggtctctttctccctgctcttttctgatctggggtggggtgtggggagccaggaacaggtgatcttccagaccccttgtattgctgggttaggaggcccacgtgtgttccattggcgaatacactagtcaatcattaggcccatcatcagtcccacctaccaatgcctggcccccatcaaagaccagtacagaatagagaagggccagcaggaccggggcagaaaaccctgctcccatcacaaacccttctgcctctgcccgcccagcccacaatgaacaccagaattcagagctactgccagtggaaatgggaagggaccacctctgtgagcactttaggatttctccaagggatgagaaagactggttaagagttcaggggggcacagtggctcacacctgcaatcccagcactttgggaggccgaggcaggaggatcacctgaggccaggagtttgagaccagcctggtcaacatggtgaaaccccgtctctactaaaaatacaaaaattagccaggcatggtggcaggcacctgtaatcccagctactggggaggctgaggcaggagaatagctggaacctgggaggcagaggctgcagtgagccaagattgcgccactgcactccagcctgggcaacagagtgagactctgtctcaaaaaacaaaaaaaaaaaaaaaaaggctgggcacagtggctcacgcctgttatccctgcgctttgggaggctgaggcgggtggaccatgaggtcaagagatcaagaccatcctggccaacgtggtgaaaccctgtctctactaaaaaaaaaaaaaaaaaaaaaaactctactaaaaaacaaaaacaaaatacaaaaaaattagctgggcatggtggcatgcgcctgtagtcccagttagtcaggaggctgaggcaggagaatcacttgaacccgggaggcggaggttgcagtgagccgagattgcaccactgcactctaacctggggcgagactctgtctcaaaaaagaaaaaaaaatccattccctactggacagtctaccatgatgtcttagaggtgcctcaaattcaatttgtttaaaccaacccattgttctccctctggggatgggagggatgcccctctggctgaaaccccaacctatacatctgaccgtcaatcacccaggctctgccttctgacccttaactcccctcagcccctgtcaggacttctaggccagagctccagttcctaatggtgttttctccttcacctccctcagcccagtcctcaccagggccctcatggctcatggtgggggcctcccatcttcccacccatcaccacactggagccagggggctttttcacatcacctgtgattgatcatccgtagccttgatcaaaaccttcagtgacttcatgcaaggacacaacatgtatgcgagacaatggggagaaaaacagggagtaactaaagttcttgggggaaaggtggtgaaccactaatcactccagacctttaatttcacaaatgagagatatgagactcagagacacagagtacccagctcaaggtcacccagcaaggcagagggagatggtgtatttgggggacagtgacgctctgtcccacctggcatgctgtccaccccccatgtcctcactgggcactgtactccagccacatggagcttctgtgtgccctaaacttgaacagctctttcactctacttccttcctcatgtaggcatgtccttcctctcctccccacatccacagtcctagccacccgcccaggcccagctcaagtgctgcctcctccaggaaggcttccctgaatgcctatgctgacctcctctgcatgccttccctcccatcactcagcattctcaggtttggttagaatcattcttgggcatgtcctccagacagggtgggacttgtcttactcaccttcatatcttcaagagcaccctgcacagtgcctggcctgtcacaggtgctcgacaggtatttctggaaggaattatcattacatttatattgtcattatgcatgtctggcattgacagttgagtcagccactgtgctcagtgtacgagtcagaagacatgcgtcttcaaaacagtcccaacgattagccccatttcacagatgaggaaactcaggctcaaaggaaattgattgcttgccctgggtcccactgctggaaggaggcagagttgaaacttgaccccaagtgcggctgattctaaagcctgtgactctttgtttttgtttttgttttaaagacggagtcttgctgtgttgcccaggctggagtgcagtggcatgatctctgttcacttcaacctccgcctcctgagttcaagcgattctcctgcctcagcttcccaagcagctggactacaggtatgtgccaccatgcccggctaatttttataattttagtagagacggagcttcaccatgttggccaggctggtctcaaactcctgacctcaggtgatctgcctgcctctgcctcccaaagtactgggattacatgtgtgagccatagcatctggcccagccaagcctataactcttaatctctgtgttctctctgcagcagggatgacggcgctcctggaggctggctgggaagctggtcagggtcccaggactctgacacccccaatggcccttgtagccttggggagtcctgtgatccaaggctggaggactgagtcccctccaggtctcatagcagacgaatagcagcttcacccaggcctgttttgtcgtggccccattcagaggccgccctcctctgtggtttagagcatgccctggaatccctagcacaaccaggtgacgagagttccccgctggccccctgccgcgggaacacaaagtacctttgcacataacctttctttgtcctctgctggtgacggcaaatagggcaggcccagggcaacgtggtaaggtggcagaagtttgttttggacagtgtttgcagcttctctgttccctttccaccaggggttacctcctgctggctgaccccttcctgtgctgcgggctggaatatagggtttaaccctgttataacccagaggaacacaaaaggaggaacatcaggctttatggagagactggaaatgaagtggaggttttccttgctcatgaaacctggctcaccctacaggtagtcccaaagagagcttgtgattttctttcccctttggtcccccgaccccttcagagctctctgggaagctatgctctctcactgctttccctcccctgatcagagtccctgtgccaaggctcctggatactggggctggaaaacctcctgtcccttccaccactcctgtgccctccagggaaggggtctggggtctcggggctcacccccacctgtgtgccagtccctgtgctaggcctgcacagacatcagctcgctgatcactacgagaacctcaactcttctccccatttcatgaggacaccgaggctcagaggtgttcgtgatactcaagatcacactgccagagcgtgagttactgggatttgaactttggtccgtgtggctgcaaagccagtggctgctatgattctctttccacttgctgcagcccacgtccctctgggcaagtctgacaccctagctgccctcaactgcctggccccgtggcgtcccagagggcgaggggagcacagggactgggcacagaggccagctggggtcaaggcaagggggctgcccagcacagtggttctgctccagaggtgcagtcagactgcctgggttggctcatgcctgggtctgtcattgtgggcagcgtgaccagcctaaacctcagttttctcttttgtcacctatgtgctaaaaatacttatttctggagattcttgtgaggattaaatgagatcttccaagccaagtgctttgcatagtgacgcagggtaggtgctcaagaaattttgttgtctgcctgtggtctgggtgggggcagggtggggctgcgatggtgaagaaatgacacagaaacccacaggaaacttcatcatctagatggtacatggatggcacattcaagggaagtaacgaaacgagaagaaaaaacttttacattttggctgagcaaaggcaacaatataattaccatcatttataaaaactgcctcccattaatgtctaattcccacaaagcgcaacaatgattatctcattaactatgtgtcagattaactttgttgcaggttttatttgattaaaacagtgaactcacaacacgtattatgctcattcttcatagtttgtggtttctggagcatagtcctctgttggcaactttttctaaattagagggcacgtttctgggtaagttgttttttagaaatttagttatctggagtcccaaagcacccagggtggagggaagggctcagagcttcctattagcttccacctttggatttgctaaggccagtgatgaaagatgaattatgtatccatattttcaagactttgggggctgggcttgggcttgggccgggcgctgtggctcatgcctgtaatccctgtactttgggaggccgagacaggtgcatcacatgaggccaggagttcgagaccagcctggccaaaatggtgaaaccctgtctctactaaaaatacaaaaattagccagtcatggtggcagcacctgtaatcccagctactcaggaggctgagccaggagaatcacttgaacccagaaggtggaggttgcagtgagccaagatcatgccactgcactccagcttagccaacagagcaaaactctgtctcaaaaaaaaaaagtcttattcgaatattttactgtgtgcatttgtattacttttgtgacatatataattttttaatgtctggaagcggaagatactgtttttattccctccccctccccctggccccgatatattgaaaactctaaagttgttatatcctggattctgtttcctccatgaggagaaaagtttgttatctgtcatatgcacttaagcacctgatgtttttctcattttctggtaggtggtgcagacccctgtcccctcctcctcacccctaccttaacagggagaagctgcctgtggacagctcccagctgcacagggaaatcgctgaagatttctaatagggaagtgtcacactttgccaactctggagaagacagaataattggctggaatcgcagaccgggtcagtggtacaagagaaggcagaagctcggtggggaggggttggttccccagcatttggctgggcatctcccacaatgccagaccagaatcattgtatcctgaggctcgggccattccgtggcccccggtcatccccaggagctggagtatgtgtctgctgcactgtgggagagcccctgcacccacactgaacccaagggtgaccctttccctgagatcaagtgatgtagaggctcaggaagagcccagctgcagtgctcaactccaccagaagggaaggggagggaagggggcaacagaaacccctgttgtcatgcagaaaaggaaagcttgtctgggaaagggtgtccgcactgtccttccccagggctgtgcagaccgatggtctgcaggtacaagtaccaagcagagagggcctgctctgattcacacttagctctctgggagagagacaagggcaagcttggatcctggaggaccagagagaaaagcccctgacctaggaggtaggaaggggagggcatttatttgttctatctgctcctgatcaaaatgtagtctccacatgtggcctgtggaaacagacccctcacctccagctcaaggctcctgtgtactgtcctcctctagtccctgtctctgtggtctagctactttgcctcagccactgggcatcagatctggggcagcatggtctaatagaaatataacccgagccacacatagaatataatattttcttttttctttttttttgagatggagtctcgctctgtcacccaggctggagtgcagtggcgtgatctcggcttactgcttgctgcaacctctacctcctgggttcaagcaattctcatgcctcagcctcccaagtagctgggattacaggcgtgcaccaccatgcctggctaatttttgtatttttagtagagacggagtttcaccatgttggccaggctggtctcaaactcctgacctcaggtgatccacctgccttggcctcccaaagtgctgggattataggcatgagccactgcacccagccagaatatagtattttctaatagccacatttaaaacaaggaaacaggtaaaattaattttttgaatatattttgcttaacccaatatgtctagaatattataatttcaacacataaaccatttaaaaagtaaagagatcttttatattcttttttcatactaaattttcaagatctggttggtatgtagtttactcttgtggcacatctcagtgtggactaactgttccagtgcccatgggcacatggccatggctaccatattggagagtgcaggtctggcactttccttgtgccctccactccccacaggggaggtcagaggcctcctcagaggcccctgtccagacccctttgcctttccctgacccaggagcaaatcatcctttgggtcggggtgcccatttatgtttccttattggacagtggggaaggcaagactcctggactgggcatcagaaggctctgccactcagcctgctgtgtgacctggagcaagttacctcccctctctgggcactggcctcattctctgtcagatgaattttcattagatttgtgactttcaaactgtggaacctgtttttccaaggcaatctcatgccgaaccccccatgtataaatcacaggagagtggagctgctcaaggcactgtgagctgctgcctccagctcccagcctggagatcactcagtggccaggccctggagcacagagggtgaaaacctggcactatcagtctgcaactcacattttcagacctaattttcttttttttttttctttctttctttctttcttttcttttccttttttttttttttttttttttttttgagacagactcttgctgtgtcgctcaggctggaatgcagtctcagctcactgcaacctctgcccctctcccagttcaagcgattctcctgcctcagcctcctgaatagctgggactacaggcgcctgccatcatgctggctaatttttgttttagtagagacagggttttgccatgttggccaggctggtctcaaactcctgacctcaggtgatccacccgcctctgcctcccaaagtgctgggattacaggcatgagccaccgtcccggcctcacacctaattttctaaacctgcaaatgacaccgtaggttgcttatgggcccgtgtacatagtaaaagtatgaaaacatgcataggaaatgtgctggtttcaagttagtggtctcctctgatgagggaggaagaaggatgggctagggatgtcacttccgttctattgccaaaatttaatttttgattgaaagagacctaaagagaatagagtgaaatatttacatgtgtccaaatttagtggtgggtttgtggctgagatattactctgtacttttctgtatatttgaaatattttacaactttaatttgaaactttaagaaggacaaataaatataatctggtctcaccttaggcatagaatttatttatttatttatttatttatttattttagacggagtctcgctctgtctcccaggctggagtgcactggcgcaatcttggctcactgcaacctccacctcccagcttcgagtgattcttctgcctcggccacccaagtagctgggactacaggcacgtgccaccaagcccggctgatttttatatttttagtagagatgaggtttcaccatgttggtcaggctggtctcgaactcctgaccttgtgatcagcccacctcggcctcccaaagtgctgggattagaggcgtgagccaccgcatccagccaggcatagaatatttttaaacggtcaagtaaaatgtaactttccctccccacaacacacttggtaatccctaagaccccccaccgccccgaccatctccctgctctggtagttcaggaatgtaggcgctcaattgaccaagggtcaggagttctgaggaagcagacagcagctgagcatttattcaataagtatcaactctacctttggggtatcaggtatgtgggggtcccagagaattgagacccaaccctggttcaagaggagcctgagatgggtgagacctttcatggttaacctggcctcagggatggctgtgaggggccgagggaggaggagggatctgcacctctctggctcccatgcccccagcctgcggtctctgggtggagggaggcccctcctctccatcactcactgctctttcctctcctatcgcagcttgactctccaatgcactgcggattgccttgggcccctctggtcgagttttggggggctcagctcacccctctgaatgtgtgtgtgttctcccctgggccccattgctggttcctcccagtcaccgtttcccccacatccactgatgaggccccaagctcagaaagttcaggagacctgccagggtcacccttctgggctgggcatggcaggaggagggttgtgggagggcagctatgtaccaagtccagcgaggttatttcaccccagcaaacaggtcctgctggtttgccatttggagagagtttggccccagttcccatggactggttaaatggtaacttgtcttcagttgtttgtggaaatgtgacagggcacaggccaccagctaggccggaaaagccgtgtgaggcccagctagctctgggcattggactgcaagccatgcttccctcccctcccctcccctcccctctcctctcctctcctctcttttgagacagagtctcactctgtcacccaggctggagtgcagtgtcgcgatcctggcccaccacaacttctgcctcccaggttcaagcaattctcctgcctcagcctcttgagtagctgggattacaggcgcccaccaccacgcccagctaattttgtatttttagtagaaacagggatttaccatgttggccaggctggtctcaaactcctgacctcaagagatccacccgcctcagcctcccaaagtgttgggattacaggcatgagccactgtgcctggcttttttctttctttctttttcttttcttttctttcttcctttttgtcccccacaaggtttcaccctgttgcccaggctggagtacagtggcatgattacggctcactataaccttgaactcccaggctcaggtgatcctccagcctcagcctcagcctcccaagtaccagaagtactaggactacagacacatgccacgcctggctaatttttttttttttttttttttgagactgggtctggctatgctgcccaggctaagcaatacttattttccttatttttattctaataagattccagaatcttcccctttcacatgtcttcctagccagatgagtaagagcaaggaggagtggtgatgttaataacagagtgacacagcctttgagggcctttcattggcagatttcttaaccaagagcagctgtgcccattttacaggaggaaaaactgagacaaagaggagtgaggtcactatgagtcactggcctttctggcctaactcagactaggctcaatatggctgagccaaagagacagagcaggctgggggtggggatggaaagaaactctggttcttcaaagagagttgactgtccttgctggccttagacatcaccccttccctttattcagtgcctgcctgattagagctggacatacaggatctcatctgctcccacaaccaccatctaaaataggcagagcaggttttacttgccctgtgttagttacagacaaggaaacagagttacagacaaggaaacagagtcagcaagattaggagccttgtccagttccacagctggtcaggcccagggagaccaggccgctggacaccagctcaagatgcaagcttatctgcgattcccaagcttataccaggcctgactctgtttccagcgaaagaaccccaggacataatgtttctgagctgagtgttagatggatcaggggctaaggatttgggaggacctttcttgaaattaacagctgcttcgagagtgaggcttccgacccgccctttctttatttcctctgggcctggtttggcagacctccacccccagcccacaatcccagatggacagaggtagttctctccagcttttggagacctcggggaggaagaagcctcgctcacccgctcctagacagtgtgtgtgagccctcaggcacccagggtgggcaatgcttcccaggcagagagggcgtgcaatgcaagtgaggtgtccattagacagacccagggcactccaagccccatagagtgactcactttctttcttggcacccccaaacgactctaccttcctcagcaggtcttgtgaaggtgcagtgacacaatgtgcatgaaagaggctcgagcaggacctgatgcacagtaggtgctcaacagctccgccccgccccgccctggccccccgccacagcttcctgtgcccctgtgctgtgatttcagcctcagaggaatggaagaccccaggatttccccaggagggagtctggcatcctcgccatcgtggttggctcctgtgctcacccatcgaggccactcaatgctgcgctggggtgggagattctttattgaggaatctgcagaggtcaggggaaggcaggagccagggccacaggggaggccggccaaggacagctgcccacagcaggccacagctggggccctccccacactgcatgctggcttgtttttcatgcaaaaccatgttatgtaaatcagtgctgggttgagcacactcaagtcagagtcacgaattgggtcccccaccgcccatccagggtgtctgaaggcctaggccagcatgcccattattcagccagagcaggtggccgagccagctgggctcgtccccaaatactttcagggagggacgctaggcctaggacccggggtctacagccctgaggggagggggcagaggatgcagccttggaaagcccagtacctggtgagtagggaagtgtcctcccaggtggttccaacctttaacccaattcctctgtcttggaggcaaagggaaaggacgtggctgatccccgcagagcccaaggccagccaccatcctttcatggagccaggcagcttcgagaagccactgaggctccttgtgctccttgtgtgggcacaaagtgtgggcttctggagggggtccttggacctctatctcagcagggacattcctcctccccccgccttccagacctcctgctccagatgcctggcttctccagggcaccccgatgggtggctctgccaccccaggacactggactggggccacccttacagaaccggttcgaagccaaacaatggcacgtcacagtccagctgagccggaggcctcagcagggtaagtacaagtgaggctgtggccaagaggggcataggtgccagggactcagaggcgggcgcgcgcaagtgccagcaagccctcactgcctaacatggcagccccatggcttcctctcttccccgtgacctgactgcagctttgaggacagcacttgccctcccctcccaggcagcgggccccttccctggccccagaggtgaaggagggcgacttccccagggagaggaagcagaatgacggcctgcagctttcctgccgcgggaggggaacttcaggtcagaatggccgtctcaacctcatggaagcctccctctggactgacgagtgaccgctgttgtggtgggaggtccaccttcccgcaaagggagccaagagcccagaggggtcacttgggcccagggagggtgggacacagacgtctgggtggaagttggacaaagtctggcagaatggggcaccagggcacagtaagaccctggctgggacactgagtggggacagtccccagcaattcccttggagataaagagcctgcggcaggtcccagatcctgacagaggacagacaggaggggacaagctggtggtgggggtgagctggctaggcagaaagctctgtggacacctgaggcctcctcctggaattgccccaagccatgtggctaaggcctagggagaccctcaccatgtggggtggggtggggtgggggcccctagccaaagctgggaaaaggcagagccttcagagagcctcctagggacagcagcagagaggaagccttcgaggcctttccaagctccccgctgcccggctctcctcctgcccagcacaccgtgggtggactccaacctacagcttcactgatctcagaaggtcccaccctctcccgccttgtgcttctgactgtttatttcctgcagaggagtcagtgttactgccactgagaacagagatggctccacccagagggcccacccttggggcacaggggacccttgcccataccccctgcaccctggctccatcctaatgcagggatatgagcttgggcctgtgtcacagctgcttcctgggcctctgaatcctcatccttgagctgagggtgtgagaccggaaaatccaagccaccatccagccccaatgtctccccatcccatgactctcttccccaaataacacatctccccaaatacctctcctcctccccagtgagaggaggcgcaggggaggttgttggataactgtgccttctcctccccgaatcccagcctctccttctggatcccacacccaggggcccagcagtcacggggctcagggtgctccccagcctttacagtttacccatccctgcacagtagccatgatttcatttcctcctcactgcaaggtaaagatcattagttctcttttataggtgaagagacttagactcagacagaccctgtgtcttgctcaaagtcacctggccagtcaggggtagggctgggtttcgaacccaggggcaggccctctccgccccccggcatcggtgcagagccctgggtcgccctcctccaaggtcgttgtggtgtgaacagccaggcgccttcatgcagggcctgactgcagccgccagagcctggtgatgtcagcattgccatggaaacccttccccgggcgtcgggcaggaccagcctccccagcgcagtttccctttgtgtggactttgcaatgcgttgccaaggcagtggggcctgctgggcgggttggcatggggtggggaaggcagacaaaaacccacactgcaactggcagctcacaacagggcccacggtgcttgtgggagggaggggctgcaggctggtggcctaaggcgtgagagtcggtgggcagggggttacccacacacctgcttaggacccccatctggcaacagccttttggcgtctttggtgctattttggggtcctgctgcctaagaatcacctgggcctgggtgttgtgaaaaaggcagacctgctgggccggggtggagaggagtcagcagtttaaacaaacccccaaggcaattcgcgtatgccaccaattccgaggacaccttcagggaagaataacatttattgagcacctagctatgccaggcaggcccttctgcctattttctttctttctttctttctttttttttccgacagagtctcactctgttccccaggctggagtgcagaagcgcgatctcagctcactgcaacctctgcctcccgggttcaagcaattctcctgcctcagcctcccgagtagctgggactacaggtgtgtgccaccatgcctggctaatttttgtatttttagtagagacagggtttcaccatgttggccaggctggtctctaactcctgacctcaaatgatccgcctgcctcagcctcccaaagtgctgggattacaggcgtgagccactgcacccagcccccttctgcttatttgctcttgcattataatcctcacagcaaccttgagtgggagaaggggacagaagaaaattttttgtgtggttttttaaaaaaatcctcatttcccagaggaagacgctgaaactcagagaggttaaatctctgcttgcccacggtcactcggcatagatgtggctgagtccagattctaacgctgtagcctcctcgccatccaagctgggcctgtggcctggcagtgttcgcttcctcctcttgctggttttccaggaagaatcctaaagtacctttgcagagtgggccagctctgtccgaagcctcccacgagctcccggatctaagaggggattgagccaagcgagaatctccaagcccaggcccctccccaaactggctgcctgcagaggcttagaaagcctgcccagcctagtaaggaaaaccaatgccctggccaaagtctctcctgtcctccagccacctcggccctccagccacaccctcctctgtcctgcaggctgccctggcctccgtgctccctgaaagagctcctgaagcctctgcttcctcccctcgcccagggataggtggtctctgacccagtccacggagatgcccccttcttggaagtttccgggaagagaaattcggtcgcctttgctggcgatgttgcagagcctcctcttacaaccgacagccttcctgtgtccgtcctccacacttctgctttctctgaagcctgattccttaagaactgtctctctctttctttctttcttttcttttcttttttttgagtcttgctctgttgcccagcctgaagcccagtggcacaatctctgctcactgcaacctctgcctcccaggttcaagtgattctcctgcctcggcctccctagtagttggggttgcaggtgtgcacaaccacactcagatagatagtttttgtatttttagttcagacagggtttcaccatgttggccaggctcgtctcaaattcctgacctcaggtgatctgcctgcctcagcctcccaaagtgctgggattacaggtgtgagccactgcgcttggcctctctctttcttaacaacctctctgagggctcaaggggaaggaaccctacccttcagccccggggccctattttgcccgctgactctgaagctgagactctgcctgatgccacagccccaggatccaggcccctccctctccacctgcatctcctttatttctcatttatttattgattgattttttttgagacagggtcccgctcagtcacttgggctggagtgctgtggcaccatcacagctcactgcagcctcagcctcccgggctcaagcgatcctcctacctcagcctcccaagcagctgggaccacaagtgcccaccaccaggcccagctaatctgtaaatttttttgtagagagagggtcttcctatgtttcccaggctcgtctccaacccttaggcttgagtgatcctcctgccttggtctcccaaagtgttggggttacaggcaccatgcccagctgtgaatctcccttactaaggtcaacaaacactagtgacctccactgagagctggtgagaactaacctcatgccagggatgccaggaatggttggatggtgaatggtgttggggttcagcttgtgctgggcacacctaaagccagccagggttccagtcccaacatgaccaggccctgcctgtcccttcattgaacaagtatttcctgaagtctgtgctatgtaataggaagcggttttttttttaaagtccccaaacaagccaaggatggaggagaattaataaaagacaaacaatggaataactgtgacccctgtgtccccattgtagaagagtacaacctagtcacaacctagtcgtagttcatgtttgactttgggatgaagaggaggcatactcctgaatgctgacaatggtcatcgctagctggtggccttttaggtgacttttatatacatttgctgcgctttccaaactttctatgctgtaagatggaatttttataagcagaggagccctggcaagcctgagtatttgttgagagcctcttaaggaaagctcgttgtctacagcctctgggtctggaggatggggcagaggtcagctggtccatgccttctcctccctacaggggcacacccagatcagtcgataaattgcctggccccacctgtgcaggctgggtgaggctgcctgggtggagagcctgggcccagggggcccctggagactctgaccccagccagagtccataacaaccacaggaccagaaggcaatgaatgggtaacatccaccatgggccttataacctcctccccggcccagccaggctgggaagcagaggagaagagatgggggtgctggttgtctcaaggagagggaccccaatgtggaacaataatgcctcttgcacaggctgttgggggaattaaatgtgatgactggcccacaggccacagaggaggaaacactcagtaaacattgttgggcatgtggataaatgcacaagctggccgtgctcccttatggggttggaaatcctctccacactgcagagttgtaaagtatcctctcctttacgatctgggtgggaagcactctctgctcctgaattcccccacacaggctgcagcaggatgtccatggctgaggcagccagaaccactcttgatatctggctcccgaaggtctctctgtgccctggggcccaggcagcccctgttggaagtgccacgtccagtcctaccagagcccaagctgcagccacagaaaccaaaaggatgatagctttgtgggaaactcaaacattaaaaagaataaaaaatttaaaaactgtgaaggccaaaagaagtccatctgtgggctgcgatctctgttctaaattttagcattgatcttactaaaataacacctttgcatttttatcagggcctttctgtggaatgatttcctccaaagagagagaccccagtggtgggaagctcaggccctttggctgtgtccaggtcgcactaggcatctgtgtgtcctgtgctgactgaccagctgtgctccccagaatccatcttcaggcaccagtggatctgagattttggcaacagtccagggcattgaggttttgccagaaaataaggtagaggcctctctggaagcagagggcgtcagctatgccctgtgtttgcagagatcatctgctacaaggctgtgggtttgggattctggggcaggtggagtcccagaaacatcctctccccaggctaagcagattaaggtttccacctgttcttcccttcaataatccctgcatttgattctctaactaaacaggaaccaggccaggtagatgatcatgatttccattttgcaaatgaagaaactgaggctcagcaagtgacttacccgaggttgcacagggactaagttcaagccctaagaattaggaccattttatagcagatctcctaaaggccacaggtatcttatgatattctaccccagcagactttgtggctcttgtggctaatgaaatttctttctctttgtaaactgtattttttaatcattatgcaaacttcatgttaatatctattacaagaaccctcaaagaccaaaagataatccataacccatgaacatcattatattgtattttcacattctaccctccaatcatcgttcatagaaaatccttttccttgcctctgagatacacagtttcaaatttctaaactgtaaaggtgcatttgtttgttttgagatagggtctcactctgttgcccaggcaggagtgcaatgacaccatcatggctcactgtagcctcagccttctgagttgaagcgatcctcccactcagcctcccaagtagctgggactacaagcacgcaccaccatgtctggcatttaaaaaaactttttttgctggggagagatgggggtctcactgtgttgcccagctggtctctaactcctggattcaagcgatcctctaacccaggcctcccaaattgctgggattaccagcatgagccactgcactgagtacaaatgtgtctcatagttgatgtatacacacaatgtgcctgcaaatgtatgcattttctttccaccaaaaaaaaccctgtctttgtacatcaattatgtgtcatataatcaaggaaacacgatagatcattttatagagatgtaagaaaatcatcaatatgatttgcttcccacttcattcacttccctttatattccctggcattggccaaggttttaaaataaagacaattcagtatttcctaatccctggccagctggccacctggccacctgccaccccaggcacttgggcactggaactaactttaatataaatcaaaacagcaagaggatgtgtgtaagcccctgctctagaaattccaaggggaaatgggaaggagagaaactaatgcttaatgagcatctgctatgtgccagcctcgtgcggtggaattggaggagtgaggagggcttctgtctccagactgtaaaggagaggatgtttcaccattctgaagtcagagggagaaacgtttccaactgaattaagagagaagagcccaacttgcagtgttccctggcccctggtaattaattaatcaaagtaaggttttcttttcaaaaagtgtctttaaattgaccatctcttgtaaagctggttattttcagatgtgccatgttcctgtaggcaccagcttcacctcacactgcctcggtctgagattgtgcgcctggaattgtattgagtcagaatcacctggtgggcttgtgaaactgcagctggctgggccccacccccagagattctgattcagcagatctaaggtggggtctgagattttgcatttctaacaagctaccagtgatgccgatgccactggtgcactttcggatcacctgaggagctttttttcaaaaagactggtgcctggctcacacccccaggatctgatttcactggcctgggtgcagcctggcgttaggaatgccatggctccacaggtgattcttgtgtgctgcccagcctaagggccactgggtttaccgaaagaagccagcagacatgatgagcatttcctgagcctatgagattccttggatttcagggacaacctcctaagtcttcccagatcagggcctgccaggcagagagtctctgagggatggagggaagctgtcctatatgagccgtacttccacacctgtatctttcataccaagtcaactggttgctaatgctagtggggaaaaccatgtgaactgattagtaagatttctggcttctctggccaagcttctggaccacatggctgttgccagtgctccctcagatggcacacacttgctagcttgccacagtccccatcaccccctagtgtgttaccctccttggcctgagactcactgatttgagctacgtggcgccattgattgtccgtcttcctgtttgtggttgggtgtgaatggacaggtgctttaggaacgggaactcagatcagtactttcaaaggaagacaggagacacgggaaaaggaccctgtgtgtgctttgaggatgatggtgacctcaggccctgctcttagcctagaaggggtgggggatgttagactgaaacccaagagacttgtaatctcaccccagctctgtcgctaatttgcagagtgactttaggtaactaacaccgtctctctatgcctcagtttcctcatctgcaaagtgattgagggtaagacatgctgagcacccatgtccttcctattctaggagctggagagaaaagagtccaagtcttataactaagagttgggaggagggggaccctgaagcctagggagggagacagctgggccccaggatgtgggctgggaaggaggcacggctcgtatccagtttaaccacaggcccagccatccccagctcctcaaagctggactctgcgcccccacccatgtgtgcaggtgaagcctaattcttataccaactctgatgcgaggcgttgtgggtagtggttgaaccctggactctggagtcgatgtggcccagtcctgtggctctgccacttcctggctgtgtggtctcaggcaggttaccaacccctctggagtctcagtatctcacatgtagcatgggctagtaatgggtagctgtggggatcaaatgagctgtgcccggaaagcatttagctctgtgtgtggcagatgctcaggggtcacaatcatcatcattaagaggaggcactcaagttgtgcctggggcctcgtttatgccccagaatctcagccccaaccccaagatgtgtctcttttttttttttgagacagagtctggctctgttgcccatgctgaagtacagtggcacgatctcactgcaacctctacctcctggtttcatacaattctcctgtctcagcctcccgagtagctgggattacaggtgtgtgccaccattcctggctaatttttgtatttttagtggagacagggtttcaccatgttggccaggctggtctcgaactcctgacctcaggtgatccaccagcctcgccctcccagagtgctaggattacaggcgtgagccaccgcacccagccccaagatgtgggtcttgataatagggatcccactgccctcctaaattcctatgattgagcccagcttccccgaaatgggggtctggcccagcccaagttcactgaatggctctcagactccctacagacctgagctcttgcaatcaggtcaccctctgcccctgccctagtttcctctgccagctgccacactcaggtgccctgaggcatccgggacatgcagtcaggcagtataatctcccctagctgtgtaaccttgggcaggttacttaatctctctgggtttttgtaaaaggggaatgataacctccactagatcctaagctcctcgagggaagggatggtgtttgctttatccaccagtgtatacccagcatctagtccagtgcctggcacatagtaagtgctcaaaaaatatttgttggatcaatgaatgggtggcctaaggactaaattgaataatatatgtgaagcacagtgccaggcacacagtagcccctaaattaatgtttcttggaactgaacctatctgattccctgaacttctgtgttttcctttgtgctttcttgtggcctacatgttgggacacattccaggaacttggaccatgaatcgttaagaccttggtcatcacacttggcccctacaaatacctctcaatttcagcagtagagccagccccagggcctgtcccacaaccctggcccactttatctatcctaacgaactcaacaaccacgtctgtgtgtacatccatccacccatccactcactcattcattcattcaacacattttaaggagtgtctactgtctccatacttcctccccaggctcccccaaagctatggattcctacataccatgggttacttgatgtctccacctgggcctgccatgatgttgtaaaaggccaaaccagaccctccttttctcatacccacttttcctccagggctctctaagctgatggtgccactgccagcctggtcacccaaaaggggagcccaagagttgcccataatacccccagatgggcacccaggcctgactatttatttcctatgttcttctcagatatcgtccctcccaaacttttctgctccattagcctggggatctccaagctctttttcctgagattctctctcctcactgctctatccccatttctctctccctcctgtctatcctctcaatgctgctcccaggaggctccatttcgtgcccccaccttcaagcctcccaattgctttctgtccaaactgttggcctgttctgaagattctcacaatctgggggccctgcgacctgctcagcctcatctcctgctctctgtctcatatgtcataaagagtcccctgaccagtatcattctatgtcttacctccagggcttactccttctgcctgaaatgtctttctttcctcagctcacccctttacttggccaacccttactcaccattcaaagccagttcaatgtcacctgctccaagaaaacttttcagaccgcacccagcctagattacagactcttcagctctgctcccatctgacccatgcctgactccatcgttgtagttaccacattatttcataattatctgcttatgtgtctggcttctgcatgcttattcattgttctacccctctgtgcacagtgcctggcacagagtaactccctttgcagatactatcgctcggtaacaaatcaccccataatttagtggcttaaaagtgctatttaatcttgctcatggttttgtgggtgtagaatttgggaaggtctcagccaggcagttctcatttgggttctgccatggactggatcacccaaagtctcaagggggtgcatgcaaatgggcttgggttctgccatggctgcattggatgctggcaattggctgggagttggccaggctttccactgaggtgttacatgtggcctctcgagcacggcaatctcagggtagtcagacttcccccggaacccgcgtcccaagaaagccagaaggaagatgcacaggcttatctaatctaaccttgaaaatcaggcagtattgcttccaccacgttctatgtgttacaagtgagtggctaaggtcagcccagattcgaggcaaggggacagaagccctgcctttcgatgggaagagtgttaaaaaaatttacagacatgcttcaaaaccaccagaaccctcaacacatgtttgttgcatggatggttgaagagatggatgccaagttgcttcccacctatccctatcctgccccatgaatacctagttctgcttttttttttttttttttgagacggagtctcgctctgttgcccaggctggagtgcagtggtgccttcttggctcactgcaacttccacctcccgggctcaagacgaggtctcattatattgcctaggctggtctggaactcctgggctcaagcaattctcccaccttggcctaccaaagtgctgcgattacagacgtgagccactgcatccggccaatatttagttcttttcttcctgcctctttctcctgcaccaccgtgactccagcacatttgagggttggcagagtggcctggtggtagaagaacacaggctagcaacctatagcttctgcctccatgtgcctgctgccagctggtgtgagatgctaagacaagtccctctcctgtcctaggcttcagtttccctacccagataatgaagtgctgggccagatattctctaagatcctccccacctcccaccttctgctctaactttaggcatctctataattcctacttgctttctgaaaaggcagctggaagcccaggccagctccatgctgcaaagctgcccccagccatcatgtctttgggagttcgcatcttaatgacacaagcacacacagtacactgtggtgtgagaaactcaaatactacagaagtatgcagagtaaaacgtgaaattccccacgaccttcctttacgccctgcctccctccgaaggggactgcctccatagttcagcgattgccccagcagccttttatacacctactgtccggcaacgtgcagctttctcagaaggagaaagctttgctggggatatgtggttcgttttatcttttaacaaataaaatcatactgttcatatttctgcaactttctctttttcatgtaattctatgtctaggacatcatctttccaccacgtcccccagccttttctttttctttttctttttttttttttgagatggagtctcactctgtccccaggctggagtgaagtggcacaatcacggctcactgcaacctctgcctcccgggttcaagcgattctcctgcctcagcctccagagtagctgcgattacaggcattcgccaccacgcctggctgatttttgtatttttagtagagacggggtttcgccatattggccaggctggtctcgaactcctgagctcaggtgatctgcctgccttggcctcccaaagtgctgggattacaggcgtgagccaccgctcccagccttttaaaaaagatgctctataatttgagatggtatggttgctgcaaagtttatgagactattctccacattgtcaaatattttggtaacttccaattttagttattttatacaatcttgcaaagggccgtgttcagcgctccacggaattgcagggctgggggacactccattcctgcgtcctagagagcctctttcaagcaagctctttcaagcaagcaaggagtgcaaatcctcctgcctgcaaattgcgggctgtgaggcctgagccaacgcactggagctctctgagaacggctgtgacgagccgagctaacaatagccctgcttagcagccccgcggcggctgacttggtgaggcccgcaggcccgcctcagcccgccctccctccgccgtccgggcaggaggtgcaggggcagcagggcccgcctggctcgctgcggccgcttatcagagccggctgtggcgccggttacgtaaccgggcggctaatgctgttttacttgtcgatgaaacccaaattaaaagaggaaattattgtcctgatgctcaactcgcctaatccccatctgtctcctctctggtcccccgcgctgccgagcgctcgcatctaaaggtcttgaacgcgttccaggtttctaatttcgtttgcttatgcaaccaaaaatattatggccgcgtttcctgggggtgatgaagtctatattctgggctacaggcacactaaaaacggcagcgccagggcccagcgccgctcgcgcgtgcaccacgcgccggctttttttggttcctccgaggcgcgggcagctctgcagccgcgggggccgcaggaggtgggggctggacccgcccggagctcgggagggcccgggatggccccggggagcgcaggtcccggcaggggccgagcgaacaagggccggcctggggcgcccagagacgcgggggaccgttctggtcgcagctgcctgggtgacctcttggaacctcagcttcctccttgttttttttctgattctgactctgattcctgtgtgctgaatccaggctgtagtgagctgtgatcacaccactacattccagcctgggtggcaaaaggaagatgagagagagacagagagagagagagagagagagagagagagagagagaagagagagaaataagggagacatcaacaccctggaatattgtgtagatgagttttaaaaaaaaaacaaggtagatcaagatgtattaacatgtatcagattgttaaatttctttaagaaataaagtcattgaaaaatagaaaaatacagaatatggttcaacttgagtttttaaaaatccatgggctggtgagaagcaaaacagacttcagtgtttttaccccacttctgtattgtctgaatcatctgaagagacgctgttcatgtatttcttgcataattttaagtatctgattttaatggtatgagggacgggatagcaggggccttcctgaccctgtaattctctggaagcagtggtcagatcaggagtgggactggctgcaaggcttctgcccccgatccccgaccccaggctggggcttcaggatgcccgaccacagtgttctgagggcctctgaccatcaggaggccactggaagtcttagggctgagggaggcatgggtactgggcctgggagggcagacgctgagggcagagcaagggccctggagtcagaacccaggcttctagtccctggagcattggctcaaatggcagagtctcccttgttcctgcggccactctgggtcttgagactggtggcatcctctgccctgacagccaggccaggaccagtgcgaggaggagccaatggaccctggctggctccgaggctgcggggctgggtgtgaggcctcaccttagccagttctggagatgtgccccttgacgtggcttctctgggcgaggccaggctccctgtgggccccagatgcagagagccaggattgattctcaagccacgaggtaccccccatccctgagataggcccagcctatgtgcgtggccctcatcagccagacacttggaaatatccgcacagttgctggagaagcagagaagaggccgcttgaacacagggagccatctcccacagcacaccacagacttccccgggtgcgcgccgaggagcacggattctgacaaggcgttataccttcaaatcaggttctaatagccaagaattgcaggaacccctgtgatgaactaacttaagcaggtttctttactttaggacttctcaggacctttcctatgctggggtacatgatgagtctccatgaaggtgtaatgagtgcaacttttactagaaacccacggactcaggagccctttccttccagagcatctcacagggctagagggctccaaaaacactgagccaatgaaggtgggaaacaagcactgagggtgcaggaccatcgcagacagagtttgggaaaacttaagaggaggatgaggcctggtgcagtggctcacacctgtaatcccagcactttgggaagccgaggcgggtggatcacgaggtcagaagttcgagaccagcatggccaacatggtgaaatcccatctctactaaaaatacaaaaattagctggacgtggtggtgggtgcctgtaatcccagctactcaggaggctgaggcaggagaatcgcttgaatccgggaggtggaggttgcagtgagccaagattgcacaactgcactccagcctgggtgacacagcaagactctatcttggaaaaaaaaaaaagaggaggatgagtaagcactgtcctgcatcactcaacaagggggatatgtcctgagaaatgtgtcctcaggcaatttcgtcattgtatgaacatcatagagtgcacttacacaaacccagatggtagtatggactaccacacacccaggctactgctcccaggctacacactcagagagcttgttactgtactgaatactgtaggcaattgtggcacaatagtaagtatttgtgtatctaaacatatctatacatagaaaaggtagagttaaaatacagtattataatcttgtggggctgggcacagtggctcatgcctatactcccagcactttgggaggctgaggcaggtggatcacttgaggtcaggagttcaagaccagcctgaataacatggtgaaaccctgtctctactaaaaatacaaaaaattagctgggtatggttgcgggtgcctgtaatcccagctactcaggaggctgaggcaggagaatagcttgaacccaggaggcagaggttgcagtgagccgaggttgtgccagggcactccagcctgggcgacacaagcaagactctgtttcaaaaataataataataataataatcgtatgggcccaccactttagctgcagtctgtagttgactgaaacgttatgaggtgcatgactgtataagaaggtgtgagaaaagtggaggccacctcacctgtgagagatttgtttaaagaccagtcctgctaatagaatgcaggtgggtagggggtggggaaagcccatcaacagagcaggtgtgggactaacattcatctcttttctcggagtttgacacctgggctcatgcacatatgtgcacctacctaggcacatacccaaaggtacacatacaaaaagctcacatacaagcatgtgctcacatgaaacacacacaagcacacatggaagaacatatctcctcatgggcacactcgcatacagcaaagcacacacccatgcacacccccaggtgtgtgcccacacagacccacctgccaaggcaaacccatacaaaacacatggaaacacagatggaggcacgcatatccacacacatgagccggagcacacacagacatgcactcagcgcatcacacatcaacactcgcgtacacgcactggggtgtgcatgcggaagacaggtgcaggcgcatgctcagagcacgcacctgcatccacacactacgcattcacaagcacagcgtgtctaaggccataacagcttccctgcctctttgcggaggtggggccagtgggggtgggagtgacactgtgttttagagggaagctgaaggactcccaagcacgttgagtaaagcagttcacagaaggcatatgtcctttgagtatttttatctttagcactcatatgtctagcagagtctgggtggctccatattgctaccaggaaggaggacaagtggctggatttgaaagcagatggcccctgggtgcagaggaaggataccccttgctccctcccccgccacaccacagcgtttcctacctcaacatatggggtcccccaaaggcctgtgcaagccacctgcttcccactgtgaaaacagctggcagagcagattcctcagcccctagctgggtgcctggagagaggttctgacagcccccagcctccaaccaacccccgtctcgggagctcaggtctccagagcactttgggccaggaccatcagtcttgggcctgggctgtgacccactgtgggcggctctctgcagctgcctcgaatgtgtgcatggatggtgttttcccctatccctgagctggcaggaggtctgggcacgtgccctggccctctggctggtcaaggacaagccgatggatttcgaaagctatttaatccctgggttctgacgcacccggttcaccaccaagcgggatctagtgcccacaatctgatgtcagagggcgggagtggccttggccaggccttggcatgactccatcccctgcccacatggcactgtggtggagccggcagggagcaagaggcgcccagagccttcgcctcttgaatcacaaccatttgttaggctcgcaaacaccagcatggcctagaaaatgaggtaaaacaataacaaggaaaaataatcaggtgctattaagtgaaaagagcagataagcaaaacattataatcgtgtttatttgagaacagtaataaatatatttaggcagagggaaaaaactggaaaaaccaacagtgactatctttagaaatgtaccattcaacaaatatttactgagtacctgctattggtcagattgttttaggtgctgggcatacagtagtgaagagacaaaaccctttaagaagcttatattctagagagttaacaggcaataaacaaaatatacgagttcaatatatagtcaattagccaggcgcagtggctcagacctgtaatcccagcactttgagaggccgagatgggcagattgcttgagtccaggagttggagaccagcttgagcaacacaatgaaatgccatttctgctaaaaatacaaaaattagccgagtgtggtggttcatgcttgtagtcccagctacttggggggctgaggtgagagagttactcgatcctgggagttaaaggctgccgtgagccgagatcgagccactgcactccagcctgggtgacagagtgagaccttgtctcaaaaaaaaaaaaaaaagttaaatggtgtaaattgtgttaagtataaatggtgttaagtacaatgggaaaaggctggtttgggtttgagaattgtgggttgggggctgtaatttttaatagattcaattttttaagctcagttccagttttacagaaaaattaagaagacaatatgtcacagatgggaactgaacaatgagaacacatggacacaggaaggggaacatcacactctggggactgttgtggggtggggggaggggggagggatagcattaggagaaatacctagtgctaaatgatgagttaatgggtgcagcacaccagtatggcacatgtatacatatgtaactaaccggcacattgtgcacatgtaccctaaaacttaaagtataataataaaaaaaaagattacacaacaaaaaaataaataaaataaattcttgaagagctattaaaaaaaaaaaaaaaagaagacaacatagttacccccaaatcctccctcctcctgcatgcagtttctctcatcagtgacaacttacattagtatggtacatttgttgcaatgaatgaaccaatattgatacattattattattattattattattattattagagacagagtcttgctctgtctatgtggtggtgcggtaatggctcactgcaaactcgaccttctaggctcaagccatcctcctgcctcagcctccagagtagctgggaccacaggtatgcaccaccacacctggctaatttttgtattttttgtagagatagggttttgtagagataggagttgcccaggctggtctagaattcctgggctcaagcaatcctctcgccttggcctcccagagtgctgggattatagacatgagccactgcaccaggccttgatacactattatttaccaaagtctatagtttatttagattttctgggtttacctaatgtcctttttctgttccaggatcccatccaggatctcacattctacgtcgttgtcattgtcttgcctcctgaggctcctcttggctgtgaccacttctcggacttttattttgatgaaaatattttgatgaccctgacagttttgagaagtcctggtttggtgtcttggaggatactgctatactggaatttgtttcgtgttgttctcatgtttagacaggggttatgggtttttgggtgtctgatcacaaagccgaggtgccgttttcatcatgtatcctatcagaggtcctatcaactggagttacaaagatgctgactttatcacgggtatccgctgggtttctgcaccgcagaatgagcccccttctcccgttccacactgtactctttgggaggaagtcactaagtgcagccacacataaggcctgggacttatgctttcagccccaactcatttagggtgaaatagtgacataaattggcctggtgcagtggctcatgcctgtaatcccagcactttgggaggtcgaggcgagcggatcacctgaggtcaagagatggagaccctcctggccaacatggtgaaaccttgtgtctaccaaaaatacaaaaattagctgggcgtggtggtgggcgcctgtaatcccagctacttgggagactgaggcaggagaatcgcttgaacccaggaggtggaggttgcagtgagctgagattgtgccactgcactccagtccggcaacagagtgagatcccatctcaaaaaaaaaaaaaaaacgacataaattatttgaaattcttctgcgtgggtttttttgtgtgtgtcttctcccccatttattaattaatccaagcgcttatttataatggactcatggatatttattttacacttgggttatactactacttcattttactgctcaattgttgcagcgtttggttgttggcagctctttcagtcggctccttcatccctttgatacccctctctccagcaccaatgtggttcttttctttttgagcccttccttactctctgacactacacgatgctcctgtcccagtcctggaatcagccatctctcccaggagccccggatcctttcactgaagaatggtattagaaaccaaggtactaggtgtgatctttttgttgttgttttgagacagagttttgctcttgttgcccaggctggagtccaacggtgcgatctcagctcactgcaacctcggcctcccgggttcaagcgattctcctgcctcagcctcctgagtagctgggattataggcgcccgccaccacgcctggctaatttttgggggttttttttttgtatttttagtagaaacggggttttgccatgttggccaggctggtctcgaactcctgacctcaggtgatccgcccacctcggtctcccaaagtgctgggattacaggcgtgagccactgtgcccagcctgatctttactttttaacatggtggttagtgaaggctcttctgagaagataacacgtgaatgaagatgtaaagaaggtgagggacaaactgtggggagcttcaaggaggggacttcaggaagaagggataccccttgctccctcccctgccaccccacagccttccctcctccaacatactgggtaccccagaggcctgcccaagccacctgcttcccaccagaaaaatagccagcagggcagcaggtgcaaaggccccaaggccgacatgtgcactgcgtagtcaaggaacagaggccagtgaggctggagcaaatgggccgtggaaagagatggtgttggagaggtggggcaggagcagatgacagaggggccgcccgacaggacctcggcgttgccttagactgcagaggaagcagacaagtgacactatcaactcactttttaataaaaccactttggctaccatgctggggatagcatgaaggggcaagggccgatgctattttaagaatctaatgagtgaggatgttggcttagactggatgatagcaatggaggttgggtgaggggctcagtttctgaaggcagagccaacagcattttctgacagcttggatgctgggtgagagggggtggggggtgctaaggttttgcctgatcatctggaaggaggcagttgggattagtcacactgggggaagactggaggagctcacatggtggacacattaagtttgagatgcccatcatccatccaagcagagacgctgagtttgtggccgtgtaggtctggagttcaggggagagggtgggctggagggataacatgagaacaggctcccagctcagccctgttccccgacacaggtgtctccaggcaatggatgtacacctgtgggcttaggctgaatccaacacaggatcttgaccaaggagccagcctgtaactacatggggagagggggcagctttgagaaaacctggccccaagtcccggcaggtggagcagacgctgcatgcggctcttggtcagcttcccaaggaccccccgccttgctctgcatgggggtgccccgcaagcacccagggctcagggcatggagaggccccaggatggggactgggctttccctccatctgagctgctccccaggccagaacttgggggccacacctactttttcttccgctcccagcctctgggtcctggccacagtcatcaaaactgctgagtgaaaaaaggcacaaggccatatccagagggcagcctctctgacctttgggaagtgacagcaccaggtcactggactcccgaaacaggaggaatggacaggagaggaggagggggagaagggggtgagggaagagaggccaggggacaggacagaagacaaggagagggaggaggaggggagagtccagaggtgaggggaggtaggaagaggctggtgtcctgagctgtgtcctggtcccacagcctggtgaaggggcagctgacagcaggggtccttcttgccacctatctgtctctcacatgccacatctagtccaccagcccatgctgtgtccaccagccatgccgggggctccccctcttccctcgctgatgcctccaccctcgtcgaggccacccctctctctgacctgtgcctctggaagggcctcctcccacttccgtcctctacagtctgttctcagagcagccagaatgacccttctcaaacaaaacccagatgaggccatcgcttcagaaaccctctcccttccctagagtgaaaggccccctctcgggccaccgagtctgccctctggtctgcagtcctcccttcagtcctcccacagcggcctccctgccgctcctccagcagcccaagcaggctcacagctgccacagggcctctgcacttgctgtgccctccgcccggcctgctctgcccagcaggtgccttgctcctttgcttctttcaggtcagtgctgaagtctcttcagagaggctgccctgcccacccaatctgaaacagactcctcccaccactgccactgttcccttccccagcttactttttcttaagacttacaccactttatatatacatatatatatatacacatacacacacacacacacacacacacacacatatatatatatatttagataaggtctccctctgttgcccaggctggagtgcagtggtgcgatcttagctcactgtatcctccacctcccaggttcaagcaattcttatgcctcagcctcctgagtagctgggactacaggtatgtgccaccacgcccggctaatttttgtatttttagtagagacggggctttgccatattggctaggcttatataagtattaacgcttccccactggagtagaagctccctgaggaccaggcatttgttttgtccaccaacgcatcccggcacctggaacaagctccagcaggtgtggactccatggatacctttgaatgaatgcatggccatgcctcaccttctacagttccctagggctggctgagggaaattggttgggcctggctgtcctcctcaggcccaaacaatttggctctcagaagttctgagaccaaagtggaacctatcacacgaaagatgggaaggacaccgggcgcagtggcccacgcctgtaatcttagcactttgggaggccaaggtgggcggatcacttgaggccaggagttcgagaccagcctggccaacatggtgaaaccctgtctgtacttaaaatacaaaaaattagctaagcgtggtaacgtgcacctgtaatcccagctactcgggaggctgaggcaggacaatcacttgaacccgggaggcagaggttgcagtgagccgagatcgtgccattgcactccagcctcagtgacagagtgagactctgtcttaaaaaagaaaaaaaaaagaaacatgggaacatgggaaggaaattcaccaaaacctctgcgagcgaatgactcctttctcccaaatctgtaattttaccatgtcttccccaatccattcctcacaccttcctgatgcctcctcttcccccattccccagagcctgctatgccccaggtccttccaggacacctcttttatttttattttttaatttttgagatagagtgttggtctgttgccaggctggagtgcaatggcatgatctcggctcactgcaacatccatctcccaggttcaagcgattctcatgcctcagactcccaagtagctgggattacaggtgcccaccaccacactcagctaatttttgtattttagtagagatgaggttttgccatatcggccaggctggtcttgaactcctggcctcaaatgttccacctgcctcggcctcccaaagtgctgggattacaggcgtgagccaccgcacccaacccaggacacctcttaaacatctctcctctctccggcccactgccttggtgcttatcagctcagggaccccagtggtctcagggtttgctctcatcaccacaaggcagtttccacagagatccagaatgatcttgctaaaaaagcacgtctgatctgctcactcccaggcttaacccccttcattggccctcaggattaggtccagagtccagagccatctgcccctaccctgtctccacgctcctgctccctcctgggctcctcctgctgagcctcctgtctgactcagccacatacctgccgccagccccttgtgcccacagcacctgctcctcctctctcagccctcttcttacttgattgtgatgcattgtgttactgccatccagactgcccatttcgagttcccgtgtgcagcctgcctggacggaggccttagcctctgccctgagtcccggttgcatgggaagtcctctgggtctcagtttggatgtttgtgggtgaggagcagctgcggtgggtaaggggtggctgatgaggatcacggggtgtgctgagactccctggtccttccctcagtgacgcccctgctgtcgccacttgtccccaggctctagaagaactgggtctctctcttgtccagtatctgccagggaagaggctcttaggctcttatctgttgaatggttgaatgggtcactctaaacagcagctgtaaataatgtccatcttttttttttttttttggagacagggggcaaactttgtcacccaggctggagtgcagtggtgcaatggctgacttcaacctcaacctcccagcttcaagtgatcctcctacctcagcctcaaagtagctgagaccacagattgcatcaccacacctggctaatttttctttctttctttctttcttttttgatatagagtctcgctctatcccccaggctggagagcaatggcgtgatcttggcttactgcaacctctacctcccaggttcaagcgattctcgtgcctcggcctcccaagtagctgggattacaggtgcccaccatatccggccaatttttgtatttttgtggagagagggtttcaccatgttggtcaggctggtcttgaactcctggcttcaagtgatccgcccacctcggcctcccgaagtgctgcgattacaggcatgagccactatcattttttgtttttaaatagaatggaaaacaaaaacttaccttgaaaaatcattcttactgaaatgattaaaaagtaacattcctgtatcttccaaagctgagcagacacacagccgggccccgtcatccctgccctgggtattcacccaacagaaatgcattcatatgttcacaatacacaggaactagaatgttcatagtggcactattcaccatagccaggaactggaacctccccaaatgtccattagcagtaacatgggtgaatacattttaacagagccacacaatggcaagccaccagcaatgggtacgaacagcccttgactgcctgtgagagtactgacaaacctcacaaacataatatgcagcaaaagaaaccagacgcaaaacggcacccactgtatggctccatctacacacagttcagaagcaggccagagcgcctgcgggctgagtcaggagagaggctggactcgggaacagtaggtggaaggggtctcgaggggcttctgggtgccggtgaggtgctgttttttaatttgggtgctggttgcacaggtatgcaaagcatgtgcaaattctttcagttgtacactttgatttgtgcagtgttctgtgtgtgtgcttaacttcaattttaaaaagtcttaaaaataaaagtcatgtctcctggagcaggttaaatccacctcccttttctatccaagggcaagtggagagcaggtggctggcctccctggggcacaaccacgtgtcccctcatgggtgctaccagagtccctccccagcctgagactcctgaagccccagactcagggattttctttccactaagctctggtaagtcccaccatcacagaccaggcctgtgtcggccccagaagcaggatcagtgttagctgcagcctggccctcactggctgggttactccgggcctcccttgccatcggccacccccaggcttggcgcggaggcgcaggccgcctgggtcctcgggttgtgtccgctggcctccctccaccttcttgcccctggtgggagatgggagtggggcttggaggtggggaggtggggctgtcggtgctccagggtccccgcagagggcagggaagccctggacctggtctgaccttgcgcgctagccccagaggtcgccgtgctctgctgtcggcgttcaggtgcccgcggtcgggccggggagggcagtaatcaagccggcccggcggctggcgaggggcgcgggtccagcgcgctgccctcggccgccgccctgagcggttatttataaccgcgggtcgcgttacctcctgaccttaagctggggcgggcgatccgcagcgattagcatctatctcctccccgccgcccgctgcgaacaaacacccctctgtgcgccctcccccgcccgccccgcgggaggccctgcaggaagcaggatgttgacccggagcctccctgcgctcctgcggcggccccgccacatgtgagtggcgggcggtggagtgcgggtgggggggaagcggggagcaggagctactcgtgtttgatggcttcccgagttgccaatgtcctggtctattctgagtgaccgccttatttacaatatagggctccccagcccgtgtctgcccaaaggggtgccctctcccaagccagtgggggccagccagccctggttggggcagcacctgcacaggtggtcccagaatcacaggctgcaaaccgcatcctccaacagccaggccgtcgttgctcgatggcagctgaaggccataggggaaggtggttgcgtcggggtcccacagccatccacggcagaccccggctcctgcctgatggtttttcccaacggctcccagaactcttgattctggtctggagaagcctcatgaaaggaggctggggtcgcaagattggcccattcattcaacacatttttattttatgtatttatttttgagacagggtcttgctctgtcaacccaggctggagtgcagtggtgggatcaaagctcactgcagcctcaaactcccaggctcaagtgagcctcctgcctcagcctgagtagctaggactgcaggtatgtgccaccatgcccagctaattgtaaacatttttgtagaggtcttgctatgttgcccaagctggtcttgaacttctggcctcaagcgatcctcctgccttggcctcccaaaatgttgggattacaggcatgagccactgcacgccaggaccattcaaaacttttttttttttttgagtcggagtcttgctctgtcgcccagactggagtgcagtggtgtgatctcagctcactgcaacctccgcctcctgggttcaagcaattctgctgcctcagcctcctgagtagctgggactacaggtgcccaccaccatgcctggctaatttttgtatttttagtagagatggggtttcaccatattggccaggctggtctcgaactcctgaccttgtgatccatccaccttggcctcccaaagtgctaggattacaggcataagccacgttgcccagcctcaacagcttttttttaaggcacctactaggtgccaggcacctttccaggcaaaaatccttatcctgtggagctgacagtccaagggaaagagagtccttccctggagcctagggccccatgatggagccacagtctaggcagttgctgagggccctgatgggtgagtcttagggagggagactgaggcagggagtgggagggccaggcttgtagtgcattgtgggactgcagcctgcgctgggtatttgctgagcaaggccaaggctatgtgagacactaacatcctgagcctgtgaaggctgaggcccaacagtgggtgtgccccctgcctagcttcaaatgaccttgcacccagggcagagggtgaaaagctcacccagtcttgggcgtcatcctggaagaactcatggaagaggacccactgagtcaggacatttgaggagcgcattgagggcggagggagcctgggctgcccgcctttctgccacgctctcagacacttggaggcgcttgggaggagtttgcctgtgtgacgtgaccagcccctgaccactccttgccttctctgggcctcagtttccacaaatgagcagtgaaggggttggctgagatgaggcgtttcaagtctggccgcctgtgcctctgatctagagaccccccccaggccagagaccctcccaccagagcctggctcaggccaggtgcatctgcctgatgcagcccaagaggctgggccatggtggaccaggagtagctgtggccgtgggtagctggtggtgcccaacagctcacaccagcgtatgagggagtggcacatacacatatgtgtgggagtctggtgtgctgggtgtgcctcagtaggtaggtggctgcccaggggagtgtgtgcttggcatgtgtttacgaggggtgtaaggagtgtctgcagcaagtgtgtagggggtgggccacatgtgtgtaggtcaggtatgtatagttggggtgtgggcggatattggaggagtgtcttagtggtcagggggaggcttgaggcaggggaggaaggcctggaggggccactccctcactctgcaaacccccctctggccacatggtcagcctgtggccgatgcgccctgaccagtcaatgaactcagggtctggaagagtcagcggcttttccaacctctttgccaaatgggatgtcagcatgggggcaggggtggtgggggtgcaggctggggaaggtggcaatgacttcatgaccagactactgagcaggtggggagagggggcagggcgctggaggccggctgggtgggggatccactctgggtggggaggcagcccaggctcatgcttcctcaggaccgctggattccctttgtggggaggacctcctggagggtctgcagggggctcccttggactgaaaaccctccagggactgttgcatggggtcccaataagctaacaacagccctggaaggtaaggcctcttgtccctatttgacagatgaggaaactgaggctgggagaggcagccacacagctagagtgaatggtgaactggactaggaacatgggtgggcgtgtttcccacactgccccacagtgacacagcgggggcggggacagcccttaaaatccgatcctccgcgaacaccttgaatcctcaaacctccatccatccaaaaggggctccgccttggggaggcccttcgcacacttctctacaatttgaggggccgtcggctgcaataaccacatagtggggccactacaagtcaacagaagcagaccctctctccaaaaacacagcagaccctgtctccaacacagactaggcctagttccgacttccagaatgccgtggtccagccctggcattgctgactcatggggtcaggctggcgttgctcctctgtggggctggaggggccccagatcacagacctgggggtgggtgtgagcactgtcttcgtacccagaggctgaggtcagcttttgggctgctctttcttcagccatttactagtttcccatcgtaataataactacccctacctaagctttatagctcagcaaggactttcacaaacattctgtcactcacaccacccttgcaccagccctgtgatgaggagttaatatgcccattttatagaacaagaagctgaagctcaaggaaggaggttctgggactcatctcagatcccatggccaggaagcggtggccactctggaattcttgaccctgcccagaccagcaccttccacagcagagaccccctccaaggagcgggcgacgtgtgacttccccatgggtggactctgggctgcagtgatcggctagcggtgccatctttagtctgggagctgtgtgaagcctgctccccaccttccccctcctgcaaatattgggggaggggcatggaggacaggaagatagaagcaaaagtggcagtgaccggtgcatgagagattgggagatacgtgctggggaggggttccccggagcagagctggctgcccttggcactgggcccaggcggaggagtggcaagaccaacagttcctggagcacaagtccctcagccggtgcccagtgccagccatcgccatgttctcatctgccagcagcaaaatgagaaaaataaggacaatatagtgaggttttactaaagctaggtttactcaatccaaaagactgtccttttatctgagctttgtattttcaatcgtgtgtgtgtctgtgtgtgtgtgtctgtgtctgtgtgtgtctgtgtgtgtgagcacaaaaggacctttcctttgacatttccttttaatgacctcaaactcagcaaaataaaaaaactggtgactagctggtgtggtggctcatgcctgaaatcccagcactttgggaggccgaggtggacagatcgcttaaggccagtagtctgagaccagcctggccaacatggtgaaaccccatctctactaaaaatacagaaattagctgggtatggtggcggacgcctgtaattccagctactcgagaagctgaggcacaggagtcgcttaaacctaggaggcgggggttgcagtgagctgagatggcaccactgcgctccagcctgggtgacacagcgaggctctgtcgcaaaaacaaaactggtgacgacgtcagatcctaaatttttttatttttttgaaatgttagtgatgtgagaaatccgaaaggctgagacccactgggctagcttgtacgtggctctgggtgaaacctggcacaggggggcaatgttttttaattgagggatgaatctaaacagctggaagcttctcccggggggaggaggggctgggttcttgcccagactcagcccctgaggccccagcctaggcatccccaggaaacctgagcagaaggaacattcacgtaactgtactgggaattctgagaagggcctaggggccagttccccatgccacacaccctctgctcatccctgaccgggagccgcgaggcaatcttcccttaaaccccacctcggcctcccccagcacccccaaggctggttccaaaatagtccaggcccttggaggagacatcatgggtcgggctggctgcctgtcccgagaggacatggcaataacgctgtggccgaatatagagggacagtagacgctgacaggggccctggggcctgggagcctcgcaggttccacggtgcctgctccacccccatcccttctgagccctgcaccccctaacctggacagctgggaggctggcgcccctctcctggcccagcccggcccacctggggacaggtccgaacaagcccaggtagaacaggaggccggcctaggagggcccagggcctgggctgggcatgagcttggggccacctctctctagggactcaaagcattttataagcttaacttcccacaggacatcccgagatcaggagaccaagaggaaccggggtgtctgctgcagagccactcctgctctctgttctcagcttccgaaggagaacagggccataaagctggggtgtgggaggctgagaggagagcaggaagccagtccaaaccccaataaactgctggttgaatcgaatcacaaataattagtcccgatggccaagactgcctccaccctcctctcctgggaattaaaagtcaaagggcagagctgctgacgcagatgccaggggagacatgaggcttggaacagctgggactcagctcccaggctccactgccccaggtcgcaggccctggttgccccggttgccccggacacgatgtcccccaggcaggcccctagagcttcattgccaactcagggaagggggctctgctccctcacccttcccctggtgctacgtcaacagaactagattcaaggttaatcaggctgccctgaaaactgttgccagatgacagcctggaagaagcagttgccagcctctctccctcccacccctgtaagaggaggaagagatctctgcctccctgtcgagggggagcctggctccctgaaacccactgcgccccttcccctaggtcggccttgccgcaggcaccccctggacggctgcaccaggtctgcgcgccagcggtgacccccagtggtcagtgcaggacttgaacctgagccgtgggcatggctgctgcagactcatcactgcagcctcagcccacagccagtgacttgggaagccttgccgtgtgagtggtttggggatttgatcttggtaaggctgttgctggcgtttagaggtacttcgtaggtgctgatttttcctaattgaactgtggctggatcttggcctaaaggtcccactgtcagcaaatccgtgtccacatgcctaagaatgaattcatcatcttctagccctaaaccggctcctcctcctgacttccctatttctattaatagcaccgccaccctccaaacctccgagtcatcttcagccgctccccacactgggcggggtgcctgatcttgcccctcctccctccgcaggtcacccttgcattactctcctggacactcgtagcctctcacctgcgtcactgacatcctcaacgatgctgctgggtcagacctgggcaggggacccacccctcttccacttactggcctcgcgaccctgggcaagttacttaaactctctgagtctcagcttcctcagctgtaatgtgaggctaataatcacagcccctctctcctagggcattgcatgaattaaatgataggctgggtgtggtggctcatgcctgtaatcccagcactttgggaggccccggtgggaggatcacctgaggtcaggagttccagaccagcctggccaacatagtgaaaccccgtctctactagaaatacaaaaattagccatgcctgtagtcccagctactccggagactgaggcaggagaaccgcttgaacccaggaggcggaggttgcagcgagctgagatgtgccactgcactccagcttgggcgacagagccagactccatctcaaaaataaataaataaataaataaaataaaaaagaattaaatgatagaatggacatgaagaccctatcacgtaagaaatgctcgggccgggcgcggtggctcacgcctgtaatcccagcactttggaaggccgaggcaggcggatcacgaggtcaggagatcgagaccatcctggctaacatggcgaaactccatctctactaaaaatacaaaaaaattagccgggcgtggtggcgggagcctgtagtcccagctactcgggaggctgaggcaggagaatggcgtgaacccaggaggcggagcttgcagtgagctgagatcgtaccactgcactccaggctgggtgacagagcgagactccgtctcaaaaaaaaagaaatgctcaatgggtatggattattagaaatcatccagtccaatgctctcattttataagcagggaaactgaggcccacgtgtctttacaacatgctacaaagccagggacttggaagttcctgaaatcttgaagctcttccactcccctcctccaccatcacggcattctagaactcagaacaaaaggccagctcttgagtcctctgggccccttcctctgctttcaggggcaggtatgcttgggtaagtgtggtggtcactcagtcacaggaagtatgttctgggatgggacaaccacagctggtatccagccagctgagtcagggccacccatctgcaaggtgatgagtgaggctcggcacgtgggctggcacagctgcccacctcagggcacacaggggcgtgctcacatggcagctgtccaaaaagggcagatgtctctgcctttggcaatcccgccttcacctccctctccccacacacaccgcaccccagtcacagggtgatcacacaggggtcagaggaaggagggcaggctgattcagcctcttcccatctggttctgcttccctgtgggcaggtgtccttaatattctctccatgaatgagcacctggtacccacaaactccttgaaattgaaggtaggagccttgttccaggataaggatcatatagctgtcatcagatttcaaaaaggattttactcccaaaaaggcaataggaagaaaagcaagtgggctgggcgtggtggctcatgcctataatcccagcactttgggaggccgaggcaggtggatcacctgaggtcaggagttcgagaccagcctggccaacatggtgaaaccccacctctactaaaaatacaaaaattagccaggcatggtggcacgagcctgtaaccccagctgcttgggaggctaaggcaggagaatcacttgaacctgggaggcagaggttgcagtgagctgagatcatgccactgcactccagcctgggcaacacagtgagactctgtctcacaaaaaaaaaaaaaaagaaaagaaaagcaagtggacaggctttagaattggatgatccaggttcaaacaagggcccatcctggagtccttggcacttactgtctacgacaatggttctcaagtagggacgattttgccccctaggaacatgtctggagaaattgggtatgctaccggcatttagtgggcagaggccaaggatgctgctatgtatcctataatgcacagggcaggccacacagcaaagaagcacccagcctcacatgtcagtactagtgaggttgagaaccgctggttgaggtgtcctgtcaaatggggaaatctgtgccccacagccgccttggggattaaggcaggcaatggatgaggaacccaggactgggcccagcacacactccacagttgcatgggattctcctctcctaaggactttttggcctgggacatggtagctagcgggcagaggtggagtaggcacatattttggctttcacgagagaactttctgaaatgatcttgatgctcctgtcccacccagctcatggcacagtttctctagaacaatcccatgctcatttatcaacaaggaaaacccaggcatggtggctcacacctgtaatcccagcactttgggaatctgagataggaggatcacttgagctcaggagttcgagaccagcctgggcaacatggcgaaacactgattctgcaaaaaataaaaaaaaaattagctgggtgtggtggtgtgtgcctgtagtcccagctgcccggagggctgatgtaggtggatagctccagcctgggaggttgaggctgcagtgaactatgattgtgtcactgcactccagcctgggcgacagaggggagaccctgtcccaagaaacaaaaaaaaaaaaagaaagaaagaaagaaagaaagaaaaagtgggctctggaaggagccagccaccgttgccctctgggcactcaccatctcacccctcaggctccaacagggttccacgtgaccaatccccgaggggagaggagactgcggagaggatgggaggcaaagcacctccttcaagctccagggaggcaggaggatttgtttaggagtggccctgtgcagaggtaggggcatggctgagaacaccttgggaggtggtgtgaagctgagtccaggagccgccagccctccctgccactcagctcaggggtcacttgggtagcttcagcctcaacagccgtggagtcaagtgtctcctctacaaaaataattcccaaataagtcactgccttcacccctgggactggctggtgcacccaaattggagtcgccacccagcccccttgagcattgccttgctggctgatccaacagaggcagaattagctgatgaggctaccacagcgggagggaactgacctgaggccgcctggagagatgggaccccgagggccctttctggcactactcacttgttgggtctggggaattaaaacacactccccctctctgggtctcagtttaacagggaggagaccaccaccttccaaacctcagtgacggcatcaggctgggggtggtgctgggcctcctgcgtctgtgtctggagacgcagctgactccctgacaagcccagacatgcagctgttcctgcagaggaagcagcaggaactggggaagggcagagcgctgagggaggggcaagagggatgcaaggacaccacagtgaccgcgtgcagcgaagcgagtatgagcagagtcccaatctccaggtcccctctccgcggaagcacttttgtctttattggaaatttcctcccatgtaacatctgacctctaccttctcttctacagatgagctctgctgtgagtcccagcgggctgagacactgtgactgcccacctgtccccaggtgccccttctatacagccccatcccttcccagggatgctcagtggctgcggccacccttgctttctgccactcagcccttgcaggggcttcacaccccaagaggggcagtctgggctggggctcctggactccctaaggcattatcccatccccgcaagttgcccggccgggccctgaaggaaaggggccccggacccagacccgaaggctgctcaccagaggctctgcccagggactctcacctctccagccactccaactcccctccggctttcctgtcatttcctgatgccacaaatcttctgacatcctccctcttccccagtgaatttcttccccaggcccttcccttcctcaacctgcttcatactggacattcccagctggtaggatctgcctgtggctctgcacaggaggctgggcaagggtggagaagactgggggagctgtctcccatgaccccagcagaggcgagagacagaagctgcatctgggacctgtcggctgcagttttgggcattcatacccacctaagcattctggaacagccctgaacctgggcatcaaactccccaggcttgagaatggtgaacactactattaggcgccccttcctccaggcctatgccgactcccctgtgcccatggaagctgtgtagtccatgctggctctggctcatgtgggtgtccggacagtgaggccgaggcggcaagggccctttactctgtgcactcccagctccccatcccagccagggcagccttgaccctcctgcccccttgctgtgccatgtgtcagttggctgggatcatgctcttcccccgtctccatcaagaggatccaacagcatcttgcagctaacactggggcatgggagtgagggaaacaaacatggtacccactcttctgtcctaatgtttagaatcatggggcagaaaagcatcctagaactcatctagcccaactgtcattttacagaaaacaggacagagagaaaatgaccagcctaaagctcttggctactcagggcagctgggacaggggtctggtttcccggcatggagccacagtgtctggatgtgctggaactcggcacgtccccctgagagttagctgcagaggtggcgtatgggagaggaggctggaaaataggcttggaggtttcgtccaggcacacagattctctccccctaatcctcagcccctccttttctccctttcagcagcagttataaaatccaggaaataaatgtggattgatggcctacaaagggcttagttagtgctgtgacctgctgagttatgtaactgctatttattatcggccttggatgaagtttccattgaagcaactcactaagctgattccgtgacatttcttttagccttgttcagaagcagcagccgcagaaattcttctgaaacttcaaagactagaaattgatagcgtggatgcttttaaagattcccttctttcatcctttttttactttttctttttcttttttcttttgagatggagtctcgctctgtcacccaggctggagtgtggtggtgtgatctcggctcactgcaacctctgccttccaggttcaagtgatcctcctgcctcaacctcccagaatagctggaattacaggtgtgcaccaccacacccggctaatttttgtatttttagtagagacggggtttcaccatgttggccaggctggtctcgaactgctgacctcaggtgatctgcctgccttggagtcccaaagttctgggattacaggcgtgagccaccgtgcctggccccttctttcatttgggtcaattcttctctcatccatatcaaccctgttgacctcagcaatggtcccaggctttaggtgcttgggtccctgggctatgggccgcatgatgggggctgagagaagctgttttccctgcccctggcaaaggaaaggggttgagaagaacccagggctatgagaatctggagcagccagtggaaaatgcacagaatgaagtcaagattctagtcccacctctgctgccactcttggtctcaggttgattattagtaaagtgaactgcttccctcggctctacaacttgaccctccgtagtgcagcaccctccttggtctggcctgctgtcatgcagggttcgccagcccactgaggatgaagaggagggctgaggggctggtaggctctgggtgctggcaagcggaagggaggaaaggtaacactaacatggcgccaccgtgtgttcaaaagggagcagagctgggtctctccccagcaaggcagctttcctctccccaacccctttcctgctctgggagtgggtggtggcagaaagccaaggatcctcctaattcatcttcacctctcagccattcaccttagttgccaaaggggcccttgggagaagctccccgaaggctctaatgccatcctaaagtagccttttggagacttccaaaaggttcaagaaggaaaagacccaaaggaagtctaggacccagagaactcaacagtgtctctcttcctaattaagacacattcctcccattcatggaagggttcatcccgatgcctcgggacaaactggtgcgtcaaacaaagcagtttgtaccaagtggtgcaggctacatgattctctccattaaggatctgagcacgtttgtgactattgggatctggctgggcatgaaggctgctagtccacacaacccaagttgcaatggaagagacggcccaccctcaaaggatgtcaccttgaacatagccttacagggcatccaagccaagtccgtgcttgtccccaaggacaactacaactggggactcagagagatgagatgacttttgatggagcagtggtagggagggactagaatctacagttctttttcttctttttaaaataggttttgctatgttgcccaggcaggtctcatactcctgggtttaagcaatcctcctgccttggcctcccaaagtgctgggattacaggcgtgaggcaccatgcctggccttactttttacttcttattttttcgagacgggatcttgctctgtcgcccaggctggagtacagtggcatgattttggttcactgcagcctcaacctcctgggctcaaacaatcctcccacctcagcctcctgagtagctgaaactataggtgcgtgacactatgcccggcacattttttaatttatttttttgtagagatgggggtctcactttgttgcccaggctggtcttgaactcctgagctcaggcgatcctcctgccttagcctcccaaagtgctgggattataggcatgagccagccaccgagcctggccccaaaacctacagttctttaccatgacttggtttttgagttgctcacttccagctcacatcttaacacaccagaggggtctttgggaagaaacggctgtcactgcggggtcccagaaacatggctttaatatgggtgggaaggtctgataaacccttaatcgagtgaagcccaggactgggactttaaatcagtcaaggcctgcctagaggcatctgccccgtttctgctcttctccagctaggctccttcaggaaggatcaacgtttgagatgtctgtaagaatcacatgccagatttctgctcctagttccttatgaacagccccaggcaaactctccaagacagaaatgtagacggcatacatagtaaaagcctgcttgctcagaagcctatcaggccaaaatgcaccaacaggcaaacagctgaaaatgctctcctgaatttggaactcaaacccactgtcacttgtctggggctggccaaacgcaggggaaagtcagcttgatgagaaagaatagcaggaaaataaatcgaggcctctgtgggggaagcatacaagtatctgttaactgtcgagtactacatctttatgtgatctcattggttctttccaacaatcctgtgaatgagagaccatcatgacaatacaactgatgaggaaatccaagtttctgaaacaccattccagtctctttgggtatctctgtacctgagacgtcctacaaaaaatcttaatcccacttcacattaaagccatgtttcaggaaccccaaggtgacagccctttctcccaaagacccctctggtgtgatatatgagccagaattttgcattcttgcttagaaggagtgatgctaagctttttaatcatgtagagaagcatacgaccatccttgccactgttccacaccattgtacatctgatgatgctaatatcttatttggtcctttttatctgctctacccacttatatgcagtgactgtgagtttaattattgtcataaagcattatgagcaacagatactgaataaatgttttgaggacatctgaaaatgtgaaatttaccactctttcatgcttcagtatgcccctcaatgtgcctgcataggaatgaaattaactcttagatgcaaaagagagtatgaattatcttgtgtttaattttcacgggatactccttttccttaaaatggggggggggtggggtgggacaacagagaacagtattccccagaaggtccaataggcccaagcgacccctgcttcctaacacagttctgttaggacagacatggcctggaaccctggtaaatagaatagagataagaatattctgcattcaacaggacttgcaggcagtttttctttttatcacattacaaagtagataccatacctacatcatttgttcaactactgcttctaatatgcagccacagcacttgatcacgtcaccatttccgcatctgctttccttgactagcccagtctccttgagagtgtcatagtcatcttcagacacctggcatctaggaacctcaggtctgctactgagtgcctagcagggccaggtggcaagaacccttgggggtgttactcttctgacagtaaggaaactgtgactgaagggtcacaaaactgggaaacaggagatccaggattcaaacccaagtctcctgatttgagatgtggcacttgtcccaacacacctgcagtagcctccagtgttcagttgttgtaccgcccactgaggcacctgagcctttacttgtctcagtcggacctctttaccagtgggcaaggccacatctgtggttaggcctctggatcatctgaaagctgtaacactctaaaaagggggtttccatgaagatcaactatgaatttataggctaaatacttcagaaaaaactatcagatgttatgcaaatgcaagctaggcatgataacaactaaatggttatggctttttctagaaaaaaaaaaaaaaatcaggaaatagccctgacacgtgaatacagactaataggaaataaaatatttcctttaagcttttaatgtagcaattaacttcccacctcccttcccaaagcactgggatgacaggtgtgagccaccgtgcccagcctgagttcctcttgggcagatgttcccaatgggaggatcagaatcacctggtaattgtttccccatgttccccaatagagtctgatattcttgagaggagagaaaaagaaaaaaatgtttattctgtgaatagctcccggggtgattctggccatgcctctctctcccagcctagctgagaactgcagcttctaactgaagtcgctgttcccacggagccggggcttatttggtccacttctcctttggtgcttcaaatcaaattataacttcttatgttttggagacaggctcaacctccctagggctcaggtgatcctcctacctcagcctcccaagtagctgggactacaagtccacaccaccatactcagctaatttttaaaattttttgtagagatgggggtctcaccatgttgctcaggctggtctcaaactcccggcctcaagtgatctgcctgcctcagcctcccaaagtgctgaaataacaggtgtgagccactgcgcccagctccgtaactcctttatgtctgtgggtgggagtgaatgttctgtggttaaaagcaaggagctaaactatgtggcttcttttgtatagtgtcattctgataaattggaaattctaattaatccaatcctacccactggctatctgggcctcatgagggactgggcgacaatggactcgcaagcaggagtggtccttacttgtatagacaacaaccaggcaaatcagagccgggccacagaaccagggagggtcagagctaggatttttttagattacctgactaagccaccctgtcttttaacacatgagaaaaacaaaggtccaaatacatgagagttgcatgcttcaacctctgctaaatatcacacttacccactactctttacagacgcctgggcccagaccccacaggagggtccgattccacagccctgtgtgggggactctgggatactatgttaaagtgatttgctagggtcacagcctgggttatacagccttctttcacaccataccactatgtctttctaaagaaaacgagtttaaagcaaaattctatcaattatccaatatttaaggcattctgagaagtcccctaactataaaacctttcctaataaattggctgctgctgaagattaagtccaggccccttgtgatctctaggctttcatgcctacactgagtctgagggatcaggggctggttaaggaagagcctgggggctgaagcagtctctctccactagtctgaaagatagtttttccacaagggggacactgcagactacagttctagtgatgaggctggtgctcctgccctgttccccagggactaaggggcaggcagggtaaggtcctataaaaactaggaatgagccgccctagtcattgtattctagggcaaccaacctcactgaacagatgactatgccttcatctagtgaatggtcctattaacatgccaactggggcaacttttactatcacgttaaaaccccacgtttcttgaaggcacaaacaaaacacactggaagagattaaatctcgctgcactgaatctggagtcacattgtgctgccacatgatcagttttatagtcattcttccttcccgagtcttgcccaagcaaatggatcacaaataagcacgctgcgttaaaattacattacaccctgcctcttattattgaataatttggcaaatagtatgccttagtatcatgtgtgggctgttactcagggatcccacatttctcctaagccctcttgtctattctcatatctcacctgaacacgtgagccaagctgaccagcatgagggttccccactgctcacctttagctggtgccaaatggcaacagtcctgaccctcaggaatgacatgtgtgatggggaagattattggacttgcaaataaaaaccaagttcagatccccaggaacggtaaaaacaaaacaaaacacactagacctcatacatgttcatatacatatttatatatatctcatgtacaaagttacattctgaaccccagggattccataatagaaataaatactgaaataactacattgctaaatgagctctttgctcatagaaatgaagctcagcctctaagagacagcaagtgggacattctagaacccatttttcagattatagaggcaagtaaaattctgatagaatgtcttggacaaaaaacgaatttggaacataaaatggttaagatatattcaaatagagaaatgtatgacaaaattaataaaacttaatcttttaagagaaaagacagacatttagtgttacagaatagcataaccctgttagaaaagcatttatgatttccacatttaattttctcttctactcttcccatgttacaaagtgggaccaaatgagtccctttctgaacatgatcaattaagaagagccctaaatctggttgagtcctttggtaacggtcataatactcacaaggaaataaatattcagttccatggcatttgcaagacacatgttctttaggacagttaatattatgacacatctgttttattttgttactaaggcagcctatgttaaagggtctcgtctcaaatgtaggaagacctttacaagaaatgaacaatacagtaactgaaagaattgattttaaccttttctatgcaaacacaatctgaaaagttatgtgctgcatattgtgctcaaaatgttttatactctccacaagctgcaattaagagattcattcctatttttaaaatttagatccacatgggttagagaaaaatactctcaaaagtgagttcctagagaatattatccctttgcctcacagagattttaacctgcatttaagagtaagtgttaggttgaggcatatgatattgtcgcttttgcagatcagcaatggttgaacactggcaatttcatatggttcaaccttgcacatgactcaagtgtaaaaaaaggagaaaccttcaagtattccttatttcttccaataggggtacactttttttgtacagtgagatcaacccaaagtacgcaagcctcttctctcccttgatgtggtagctacaggcagttacattcctttgctgcttgtgagaagcttacattttggcattttcttccaaaaattaccacgttgaccaaagtaaacattacaagaatatgaacttgttattgggggaaaggggaagtgaagcaatctgtagaaaatatttaactgaaattacaaacataaggacaagcctttaaagcaaattatacaggcatttttgtcctctctctggtccctgcagttaattaacagggccacagataatctgacatctttagataaaacaactacacacctatattacttaagttaaagccagtaagttcaaaaaaagcaattacaaccatttgacatgtttgtatttttcatctctaactcctgatttcctaaattacattcagtcatacaaacatggctgaacaacagcaaatgggatctgactctgggatgtttacttcttgggattaaaattcccaaacactttggtgtctctttcttgtgaatctatacaacatttccaataaatgtttaataatgattttttaaaagatattgccaaaaatggctcagatttaagatgaaataaaaacatagcaaacaagctatggaaaagtagcctacattttggtgccctgcaaaaaagtgactaagtagctcaagcaaaaaattattcttttaatacagcttttaccaaaacagttttaatacatgagtggctacaattttattgtgtacacaatgtgcttatagtcacatgtggcccaatggatccaaatgcctcctctggctcatgaaatcccatgtacttcacaatctagcctaatcgtgtatatgcataaaagccactggtatactttttacagacatctttgtataatagtccagaaaaaaaaaatcagtggtacttaagaatgtttagacaatttgacatctacgtttgctttcttttcttttcagtagtccttctgatgattgggggcctttatcccataggtttatactgttaaaacagtacataaaattacatttagctttgcttcggaccggcgcgggggctcacgcctgtaattcaagcacttcgggaggccaaggcgggtagatcatctgaggtcaggagtttgagaccagcctggccaatgtggtgaaaccctgtctctactaaaaatacaaaaattagctgggcagggtggcacacacctgtaatcccagctacttgggaggctgaggcaggagaactacttgaacctgagaggtggaggttgcagtgagctgagatcgcaccactgcattccagcctgggcaacagagccagactccgtctcaaaaaaaaaaaaaaaaatcatatttagctttgcctagagtaatagataaaaaagggtaaatcacacattttcaagaagcttgagagggaaaaaattgcagcatcgtggttttaaaaaacttattaagcaagaaaatcagtgaaatccagactttaatctattttttgcttgtttgtctgttttgagacagggtcttgctccgtcacccaggctggagtgcagtggtgctatcaaggctcactgcaacctccacctcctgggcccaggtcatcctcccacctcagcctcccaagtagctgggactacaggcatgtgccaccacacccggttaatttattttgttttttttttttggtagagacagggtttcgccatgttgcccaggctggtcttgaactcctgggctcaagcaatccatctgcctcagcctcctaaagtgttgggattacaggcgtgagccaccatgcccaacctattttttttttttaatgggcattgtgaatgaaaatatgtaatgtcaacctttactttatggtatcttaggtttgtcttcttccccttcatagttttcccctttgaggataacccttcaagctcaaaagggcacaaaagctaaaacgttattcacgtacaaaataccaagtatatagctgttctgcagtttgatacagaacaaaagaaaataacttttctaattaaatccctcattctgtacttaggccagactccatccccactacagttttacttgtattaacaggttaagagcaatctaggaacatttggcaaacaagtacattttttacatggaaaaaactcaatcaacatcaccattctctggtacaagaaatacaaaacacatttcctttaaaaaatcctcccagtgctgaagtatcttctaagcttcccagagtatgtcctaagctttataaataataaatctttcagacatgtcagtatgaaaatgagactggtctcaaaaaaaacccatcagaatattcagagaagtaggcctcataaactttagagctctaataagtcagaaacaggaaacgtttatttaaatagtgtagtcttaatttctttaatataaaacccccccaaatctgatgaaaacaaagttttatataccatataaacaagatttgtcagatttgaaagtgaaagttaaagtaatttacagttagcttttaaccctctcgggacatttagatacatcctgataatccatcttgtattagtgtgtgtcaattttacaatacactggggaaaactcagctattgtatttaacggtacagtttcatttatcaagtgtttcccattaattccattattagtgacagctaacaagtgaccccatcaaatgaagtgaatgacattagactgtggcagagtaaaccacatctggattgctttctataattcaccagtttgcaggaagtaaacattctttgatttgttcataatatactgaagttacctataacactggtgcagtaacacagctagttcctctgtattgttatggtagaacggattttgtaatataaagttaacaggaaaaaatgctcacacattatgtggtgaaacttatctcacaaaagagcattaaataaaaggatagagggaaaataaaccatgcagaagagacggcttccccatctccacctgtttcccatgggctcactcattgccatacatcacttgccacactatcaagtgactcctttctgctttggtgacagaaggttcaagtggaagatcctctccaagaagttctgattctccaccttcatcacctagtgaatgataagaagactcaagttaggctgaacacataaaatatagaatgatgtgagtcagatgtaatgctcgtggttagtccatgaacaagatgcccaaaacttgtctgactttcactggagagtaaatagtagaagaaatactaagagtcagaatcctcacccatattcacccaagccactgcttgacttcagaaaaggttaattcatttttcagactgtatttataaaatccagttcactatactacgttaaaaagccaccccaacatgtctgcataccgatggtccagacatgggaagctaagaaggcaattctgtgttcatccaaaatgaagagtctactgtcacttattttaaactaagaactgagaatagtgttataaaatgcgtgagcacaggtacagagcaaactaactaaacccaaataactcacaattatcaatgacaggtgtaatgttctccaattgaagataattgacacaagcatatggaaattaaaataattagcctgcagcactgcagatggcagattcaccagctactgggtttttcttccaatgattttcaagtttaggataggttacaaattaacagtgtataatggaaaaggagaaacaaagaggttggggtagcagccaagatacaggttcttctgcatcacggctaagtgaatgtgatccatggtgtcctgatcagacactggcttccaaggcccagtctggggtacaccacactcctctccataagacccagtgcagggcataccataattctcgatacaagcttgcatcaattgtatctgttgtcacagagcagggttattttggcacaacccagtgaaaagttgtctagtgggatggattcttcagcagaatcctaaaaacatacacaccacaggacctaaagatatattccactgatctaacagaattttgtaatgtgccccatgtgaatttcagctggacaaaagaaaatattgatactgttgactagaaacaacagaagagaaaaaaccctaaatatctgcatttttctctgcaggccaaactttcccttacccagccctgtaatggccttttcacagcaatatcaaactagagagaggagaacactcagttcaaactcccatctctgaactgaaacatacccaggtggttagaaggtaaaaaaattaagtttggctcttaaattttaaaaaatttcaatgaaaaaaattaactggctgagacaaaaggctgtcgccatttctcttctgagttgttctgaagattttacttgtaagaaaattatcctgtctgctagggtctctacagcctaagttttaagtttaaatcattaaaaatatgggactttagaatcaatttctcactgttaaaatattacaggaaatgaaaaaggaaatggacccccaaaaaagatcaaatttgattttttacaacagtatattcactattaaaattagcctatgctaaagacaagtctgtttttcaggctggaaataactagagatactgccaaacctggttaagcaatttttgttctattttcaggatccacaatggaaggaatttttagtggaaatggaaaaaccacatagagattttattaacaaactcctcagtacggttccaactgacatactgcactccaacacaaagttacaaaaatcaccccagccaagtggagtccctaacaactcctctcataaaagggaattcaacaatagtcaattattcaaaacactttgaaatgactccattcctgctgacatccctggaatcaatttctaaagttcacactaacagccttcccctcttaaaagtgtcaacaaactttttgcatcagatattggtgacactaatcacatttgtcacattgtcatttaaatgaccctaatttttttttattcctttacagaattcatatctaaagtatttgttactgatctacaacactattatattctctcaaactgcctactgccttatgtctgggaactttttgaagcactgagattttaagcgagtccaagggatcagtttatttatagcaaataagctgggtgcggtgcctcatgcctgtaatcccagcactttgggaggctgaggcaggtggactgtttgaggccaggagttcgagaccagcctggccaacatggtgaaaccccgtctctactaaaaatacaaaaattaaccaggcgtggtggcacatgcctgaaatcccagctactcgggaggctgaggcatgagaattgcttgaaaccgggaggtggaggttgcagtgagccaagattgtgccactgcactccagcctgggtgacagagtgtgagactctgtctcaaaaaagaaaaattatagcaaataaataaacatatttgtacagtgtcttacaatttacaaagcactactctttcacgagcatcagttctccatgttttctttgtacctctctggccattccttctcagatccctccataagctctaatgatctttaaatggagtatgaattcagggttctatcctggaacctttcctttttctttcttttctttttttgagatggagtctcactctgtcacccaggctggagtgcagtggtgtgatctcggctcactgcaacctccacctcccgggttcaagtgattctcctgcctcagcctcctgaatagctgggattacaggtacacggcatcacgctcagctaatttttgtatttttattagagactgggtttagccactggaaccttttcttttagctccttgggcgaactcaccaaccctcatggcttttagtaccactccatgctgacagcccccaaatccctccctcctaagatagaggacctgtatattcagaagcccagtggaaatttcccacctaaatcaccactatgctcttcaagatcaacatgatcagcactggactcctctttccgtccctccagacctgcttctcctgttgacagtcctgagctctatggcccattctctccttccccacattctcatcatgcttcttatctgttcacactgttactacctttcttgggcattcacttgttcccaactcatttccctaggtctagtcttgaacctccagtccatccttcacacaactctaatcacattgctcctatagttctcttttgcttgaaagataaagtacaatcttcttaatctggtatgtaaaggcctcccatactccagtccctccctcccttttgacaacaaattcatactttcttctactccacactcttgtcattttaaaatagtttttcttccattaaaatggtttcatatctctaaacctttggccaagctattctcttacctcggagtgccaacccctggtcctccccaccccattccccaacctgaccctttgtgctaagactatgcagtgctgagtcacctcaagcatcatttcttgacttccttctctccctacccttggaaagaactgactactcactaccagagcatcagtaacattttaatttattaacatgtctctatctctgcactgttctataatctattagacgaaggctttgtctgatttgtttctgtatctccagtttaagaatgacaggtacacagtaggtgctcaattaatgtttgttaggtgagaaaatgaacaaatgaagttgtttaagaaatatttttatttctccattttgacagaaaaccgaggctctaagaggttgaatgacttgtccaaggccttctgaccctaaatcctatgcttttcacataaaacttcacattgaccacatcctgctatttctaatgctcctttcaaacaaatacattttggtatgaaaagaaataccaagggccgggtgcggtggctcgggcttgtaatcccagctggaaggccgaggcaggcggatcacttgaggtcaggagtttgagaatagcctggccaacatggtgaaaccttgtctctactgaaaatacagaaactagccagatgtggtggtgcatgtctgtaattctagctacctggggggctgaagcaggagaatcacttgaacctggaggcagagattgcagtgagctgagatcatgccactgcactccagcctgggtgacagagtgagacgtcatctcaaaaaaaaaaaaaaaagaaagaaataccaaaaagaaaaaaacaaaaaacaaaaacccacaaaatcctttcgtgtgtaaagagctcaaagagaacctcttataaatcattatcagagtggtttcttatttactttgggacaaaacccaagtcatagcacacagtgcaaactgagcacccagaaccaatgacatacccattcggaagtcgatgtagccctctcctccactgatgacaagcatagacttcaagggcgtctgactaccaggctcctgtgcagatggccctgctttgtcacccgtcagatccgtgccactactgctactttgtgggctgatgacttgacctgttttatacagaaacaaaagtgaatattacttatcacagaagggaggctgttttgttttttttttttaagtatttttagagttaaacaaaaaggtaaatatattctaataaccaaatactggggaagctagaaggctctgcatgatcagaaaacatttacatgaaggttttaagaacccgatttgaggtcaggcatggtggctcacaccttcgagaggccgaagtgggagaatcacttgaggccaggagattgggaccagcctggcaaatatagtaaggcctcatctctaccaaaaaagttagccgggaatggtggtatgcgcctgtaatcctggcttcttgggaggttgaggcagaaagatcacttgagcccaggagttcagtgttgcagtgagctgtgatgcgccactgtactccagcctaggcaacagagcaagaccttgcttctaaaaaacaaacaaacaaacaaacaaacaaacaaacaaaacccaatttgaaaatctaagtaaagcaattttgtaacaaagcaggaataggccccaaatccaatatgagatatatgcatggcaaggtgggtcttagctgcctgcttcaaactaccttttttttttttttttttttttttttgagatggagtcttgctctgtcgcccaggctggagtgcagtggcacaatcttggctcactgcaacctccgcctcccgggttcaagcgatttacctgcctcagcctcctgagtggctgggactacaggcacgtgccaccatgcccggctaactttttcagtagagacagggtttcaccgtgttagccaggatggtctcaatctcctgacctcatgatctgcctgcctcggcctcccaaagtgctgggaatacaggcatgagccactgcacctggcccaaattactttatttatttatttttgagacagagtttcgctcttgtggcccaggttagagtgcaatggcgcgatctcggctcactgcaaccttcgcctctggggttcaaacaattctcttgcctcagcctcccaagtagttgcgattacaggtgcctgccacaacgcccggctaatttttgtattttagtagagatggggtttcaccaagttggtcaggctggtctcaaactcctgacctcaagtgatccacccacctaggcctcccaaagtgctgggattacaggcatgagacactgtgcctggtctcttaaaaatttttaatgaagtcttgctatgtttgcccaggctggtctcaaactcctgggctcaagtgatcctcctgccttgatttccaagttgtggaattacaggtgtgagccaccatgcacagcctacctgcttcaaactattatagtctaaatcttttgatctgagaagacagtggaaaaggtctctcccttgaaaaggaatgtgcttatttgtgtaagagactgagaaaagtcttcaacttaagccctatgagtttgcatagtcataattaacatttaaatttatttcaaatctatggctttcctctcatatttaaggaaaatacaggttatttttaatttagattatgcaaacaaaattactagtaaatgtgctgtttgttctaaagcttaagttctaaggtagaatccttgagtgtgaaataatagaaagagagaaacctttaaatattattcacaactatgaacaaatgagcaatctctaagccaaccctcttagcaagatttaattgtgggatatttttttccttgtcagaatctgctgtcctttggtcaaactacacagactgcgcctccaggagctagctggacagccattaatgcgacacactgtaacaaaattaatgtatgttgaaagtggataggatagtctgacgtatccccacagggattcattcatgcattactcaattatactttggaagaaatcaagcatgccagcaatgacttctgttggtagacgagttagttctgccacagaagcaagagcacagtggtattactgataaggccaaccagaatggtttaatctttagggccaactggcctcgcaacaaccatgttgctaattccacttttagatttatacccaacaaaaaatccttacacatgcacacaagaaggtctgcttcagtattgtttttaatagtgaaaaaagaaaggggagaagcctagaggtccatcaacagaagaatgaataaaatgtagcacttttattcagttataataccagttaaatgaataaactagatttttatgtatgaacattgataaatctcaaaaaatgagaagcaagttgtagaagcatacatataaaacacaacatttaacatgtaaagtccaaaaccacaaaacaatcatacattgtttataaacacattcaaacatagtaaaaatacaaaaacaggggcaagaggatttgcatcgacttcaagatagtggttaccaatggagaggaaaaggagaggagaatgggattggagagggatacaaaggagatttaaaggaaactgtgatatttcatttttttttaagcaagagaaacactgttaccagcaatcccatttctaggaaggaaatgactatacaaatatataaaatgtacaaatgaggtttcagaaagctcattatcactgttgttaagaataactgaataattgcttagggtaccatatgccagcccttgccccatgtacataaaatcatttaatctttggaagacccttgggaaaataagtatgatgagtaatttgacgtgttagctcgatacccagatatttggtcaaacaccagtctagatatcattgtaagtcttttttagatgtgattaacatttaaaacaacagactttgagtaaagcagattacacgccacagtgtgggtgggcctcatttaaccagttgaaagccttagaagaaaaagactgagggatccagaggaaagagaaatgttgcctccagactgctttcagatttggactgcaacatccactcttcccggggtctccagcctgccagcctgccctgcagatttcagacctgctagtccccacaactgtgtgacccaatttcttaacagtaactctctcttcatacgcacatacacatgcatcctattggttctgtttctctgaagaaccctgactaatatactacatcacacagttagttggtgggggaaagtcagatctgaacttcgtctagctcctaaacttgcctcttatgggaaaaaaaaattcaaaacctgtgtcctgcttacagatggtcagtgacatcacttaagtattgtcaatggataatttgtcatttttcactggacatcatcacttccatcttttttctgggtggtgctttatagctcccagtagcattttcattaattttcataacaaatgaagtaggcagagcagatattaatcacatccacctaggagtgaggaaatgagtctctgaggttaagtgccttgctcgaggttagtggcagagacacaggggccagacccccaggcctcctagttcactgctttttcctattaagctgctaaaggtaccagagtgcattctctcttcctccatgcagccttgatgatagaagcttctttctagtgatttctcttattaggtcaagaccatttttggcaatccacgatgataaaataatactactgcttttcaaaagtaagcaagtctcctaaagaaaaatcaacaaatttatctttgggggtgggagagatattccaaagtaacttcattcaagtatccctatagcaccttagtcacacctccattacagaacttccttcgtatatattgaaattacctgcaattcgagtacttagccttagactattaggtagtggaaccaagagatgacagaagagagacaattacatggaacatctcaacagaataatctaacatacctgggactgccacaaagaatttcacagcatcccggtgcccatggaagcaaagctgtgcatgtgccattgaacaatagggtataaatgtccctggagtcactttatcactgttttcatcaccatatacacggattacacttccaggacgatttcctggtacacctgaggttttatttgctgcaacagaaaaaccaaataccaaatattttcccctagaaaacagtaatgaatgtaagaggttactggttaatccttatgatattatctaaaagctacagccagttgagataaaacaaggatggcaatgccaattcaagacaaagctgggaaaaaaagagatacagcatgctagttatttttaagtacctcagtaaatggagtaggggattttgccagtctagcaataagtaagcttattttttaaacacatctattcatttaaaaaataattttagttaaaaaaaaaacaaatttgaatcttagttgtttcttgttttgtttttaatgcacatgttagaaaactaaccattatacagtttaaagtaaatgggtatatttgcaaataaagtctttctttatagtttatcttctgatttttctccctcacagtaagaatatttcccttgagggggttggtaaaaagttgtgcttacaagaatccagccactacaatagagcagcttttattgataccagactgatggtgtgctgcgtactgtaaaagaccagactcacaaaacatccccattccatgggcaagtaagtaaatgaaagaaatatgatcggtaacaagagtaaacgatgtaaattaatgacagctttaagagatgtttcatgtttatactggaaggaaaacaaagtctgaaagaaagttcagctgcaacaaaagatgataaatagactaagctgctgagcagtttggtggccatgtaacaaacattaaaaaaaaaaaaaagacacctgctgcgatgcagtgactgcaagtggataacatttaggaacattcaagagggtattctagaggagtggtaacagccttacagtggctattagaagccaggaagaagagtttggttcagaatctgcacttacccctcagccccagtaaacgtccctggtggaggattacggctaaagtgagaaaggaggaaaggggacatggagaggtgcatgacagggaggagagaattactgtgagccaccactctcagcgtcttctatctggtaaacctggtgctcaaagcccctaacgaaaataacaagatcccacttggcataataccaagtaatacataaagttcttcccaaggcttctattagaatctctgctgaaaaaggaaaatctgatttatggtgttttttttttaaataataaagcaattttagtgaatctgaatcaaaacactaagaactcaatgtgcagcatttcctaaatgctaaaatttctcctttatttctctgtgtgtgtgtgttttaaaaaacaaatcctgttccaataactatgctaaaatgaagctcttacaaataactgaaatgaactctaggggatcctggaatctcttaggatataaggagaggtctaaatatgatttataagtaactgcagaaaagacaggtgggattgaaaccttgctttcttttaaaggcttccgaaataccttctagtctttctccctcctctggcctgaaaaaaggtatggtgattttgaagtgtatatgtattaatgtattttatagacttacagtatttgcttttaaaccattccctgccatgaattttgcaacacaaaaacatttacttaatggatgattaatgtaatggaacatcatatgagaaacacacgaggtatattttattcataaaaacaataaatcacattcttttaaaatagaagatagatggaaaggcttgctgaactcctgagaaacttcttccacaactttttttaaacctcaaataagacaaatggaatatactaaactatctgctaaggagatatgaaaaactaagatgaatgctaggtagtgtttttggataatggtataataaggcttaagaaaaatggactttaacttttatttcaaaagatgaaataggactgtgattcctgaactgtgaaaatgttttgacaacgaaaaacttttaattatgagtattggtcttgatacatgaaaacttattttcctagaatttataagtttcattgagtgaagtaactatagctagatctttgccatcactgattttctgagctaacacagatttgaatttcagacataactatttcctataattctcctatttgttccatggcagttatctaaaaatatacttactttctgtcaatgggatggagataatgacaccatttcctgtccccacccacaaacgattacaagacaccataagagctgtaattctcacaaaagagaagcccagttttccagtacctgtaaagaaaggagggaacacgttattgagaaactaaagcagacagtgttttacattccaagttccttagaagtagcaggattacaaaacaaaaaaaaaagaaagaaagtagtagtagcaggattgatacaacacagaggaaatgtgactagagctagatggatgtttcctgaaggttcacatcaaagtaagctcatattggggcttattgtctatctgacaattcagggttaatggaaaaagaaaagcctaaaagtgggtaacataacattattagttagaagaaaagtacacaggaaataggatacatcaggaactgtgacacaggatttacttagggaactgtaaaaccaaaccaacacataaaacaaaaaaccccaacagaaaacagtgaaactggcagggcacggtggctcactcctgtagatcctacaaggtgggatgactgcttgatcccaggagtttgagaccaacctgggcaacagacctcacctctacaaaaagtacaaaaattagccaggcatggtggcacatgcctgtagtcccagctatgtgggaggctgaggtgggagggtcacttgagcgcaggagtttgaggctgctgtgaactgtgatccaaccactgcactccagcctgtgcaacggaccaagactttgtctctaaaaacaaacaaacccagataaatcaagtgtcctttgatcttataagctgaaaaagttctggtttcccttaagttttctttgcacagataaaaatctttgtaaacaaaatctatacttttcccctcatttatatacttaggttctaaagcagtttaaacattttaagtattatacacaaataatttagggagaacaaacgcatttttgtatttcaagttaatttttacaactgatcttattttcagtgacttgaaagacaaatttattgagcaggtaatacatttaagaaagacaacactagtactcataagttctacttacaagaactgagggcatgatcgctgaatcacagtgttagaaggaggcttaattaccattcagcctaacctaggaacctttaacctccagtcaaagtagatccctgaaattagtttgtgtttgcatgtgtatatattctagggagaaggtacatagctagaaataaggttttctgagggcagtaactctaaatggttgaaaaccactgatccagttcaatcatttttcatgaaaggaatcctttatgacatttctaataatcattataacactaggtcaggtgctaaagatagagcagggaacaagacaatgatggtccctgatcttcacggggcttagggtctgtaggggagagattataaacaagaatcacataagactggtacgatcacaataatgataagcccatgaagaaaaagtatgacaggacctaaatggtctctcctgattatgacagttaggctatgacctgaaagctaagtaagtaaaaagggaccaagaagaacttcccaggtagatgatacagcagcacatgtgaggaccctgaaatgggaaggagcttgctgagctgtgggtcggtatgagcaaggagagtgtttgagaacatgtaaggtctcctggtcatgtcacctcacctaaaggcaacagtggaggtgtgtgaaggtaatatctgcaccttggttactaggcagagaacagactggggtggcaacagggagcccagttaggaggcctgggggtaaaaggatagtggtagagataaagaagtaactgatttaatacagttttagaggcagacttgacagttcccagtgacagattagatgtgggaaataagagaagaggagtccaaaatgatcccaactttccatcaagaacaataaggggccaggtgcattggctcatgcctgtaacaccagcactttgggaggctgaggtctgggccaatcacttgagcccaggagtttaaggccagcctgggcaacacagtgaaacctcatttctacaggaaaaaaaaaaaaaagtagccaacatgatagtgcaggcctgtccagctactgggaaggctgaggtgggaggatcacttgagcccaggaagtcaaagctgcagtgagccgtgatggtgccactgcactccagcctaggtgacagagtgagaccccgtcttgaaaaaaagaaaaaaaaaaaaaaaaaagagtaaggtagattgaaacgtctgacactttcaatgataaaagttcactactcctgagataacttaattcattggttctacccagcattttagactatttaaaaataaaaacaaggactgggtgaggtggctgtgcctacctacagtcccagctactccggaggctgaggtgagaggatcgcttgagcccaggagttcaaggctatagtgtgctatgactgcacctgtgcatagccactgcactccatcctgggcaacaaagcaagacctcatttcaataaacacatagatagataaaataaaacaccctctttgactggtaaagataaaacgcgttggaagcttacctaacattttgcttacataaggctcaatgtccacatcctgtagatgttgataagtgtgtgcatgatagagacggagcgtagaatccaagcgaatggagacccacacgccatcccccacccacgcaagctgtcgcacttggctctccttcctgggatgtgcatcaaaagatttctaggagagattgtccaatcacaaagttacttttgctacatagaatttcatatttaaaactgtgctaatttgcacaagttagcagactattaaaagacaagcccaaatattatatattaaacatgattactcttatatacacaattgttttcatcctggaatgcaaaaaataaagaactaagaacgggatattggacttcagcactatataggatatcaccttataacagcaatactagcgcatccacactatgtaacagtgctcaacagaaagattttttttatttctttattttttatttttgagacagagtctttactcttgtcgcccaggctggagtgcaatggcgcaatctcggctcactgcaacctccccttcctgggttcaggcgattctccttcctcagcctcctgagtagcgggattataggcgcacaccaccatgccggactaatttttgtatttttagtagagacaggctttcatcatgttggccaggctggtctcaaactcctgacctcaagtgatctgcccacctcggccttccaaagtgctgggattacaagcatgagccaccgcacctggcctaacagaaagattttatctccggattttgtgttgttgcagagccactgtgttgaaataagatcacaattataattaatcaggctgggcgctggtggctcacacctgtaatcccagcactttggaaggccgaggtgggaggatctcttgaacacaggagtttgagatcagcctgggaaacatggtgacatcccaactctaaatacaaaaattagctgggaatagtggtgcatgcctgtattcctagctacttgggaggctgaggtgggaggactatttgagcccaggagtttgaggccagtctggacaacatagcaagatcccgtctctacaaataaactaaagaaaaattagtcaggtataatggtgtgtgcctgtgatctcagctacctgggaggctgaagcaggaggcttgctagagcccaggagtctgaggctgcagtgagctatgattgcgcccctgcactctatcctgggtgacagagtgagaccttgtctcaaaacaaacaaacaaaaataccaaaatataattaaactaaaaggaacccacgctgctgtatatgtgtgtgaggcacaggctgagcattcccaatccaaaaatctgaaatctgaaatgctttaaaatctgaaagtgtttaagtgccgatatgataccataagtcacgctgaacacagtattttttttactgcactaatggtatatcatatttttcactgttataaagtatacaggaaacataaataaattttatgtttagactttgggttccatgcccaagatatttcattatttatgtatatgcaaatattccaaaatctgcaaaaaatccaaaatctgaaacacttctggtctcaagcattttcaataagggatattcaacctgtgtgtggatggatggatggatggatggatggatggatggatggatagacagccagatagctagctaattagatagatataaacagatacacagataaagatagatagatagatagatagatagatagatagatagatagatagaaagaaagaaagaaagaatagatagatagatagaattgatataaaaaacaaacaccaaatggttgactttgagacttctagggaaagaaatgtgatttgggggagggtgaaggagggctttcaccttaaaatttcctgtatgctttttgtccccctaaacaattagaatgcatttatgtattgtgacaaaaaaaaaaaaaaaccgtaagaaaacaatgctaggccggacgcggtggctcatgccttaaccccaggactttgggaggccaaggtgggcggatcacgaggttgggagttcgagaccagcctggccaacatggtgaaaccccgtctctactaaaaatacaaaaaaaattagctggctgtggtggcgggagcctgtaatcccagctactttggaggctgaggcagaagaattgcttgaacctgggagacgaaagttgcagtgagccaagaacatgccactgcactccagcctgggtgacagagcaagactctgtctcagaaaaaaaaaaaagaaaaaagaaaaaaagaaaataatgctaggaggttaggaggttttcatttttacaacaaattcccagtgcaatgttatttctgtctgggacacacatgtggatgtgcctggattacacgtggggaggacagggaggaatcctcttctcaaacaatcctcatataactaaacataaaaagaaccatgtattcaaacaaaaacacatacatatttctggatacatacacagacacacatttaaacattcacgtatgaatcctctttccttttttaaaaagccactttctaccctcacagtcaaaactggcaagagagttaagtaacacagaaagctaagatattcaaatacattactcaagtgccctaaaacacacagatccagaaacaatttctaaagaagctgaaaataattatagtctaatagtcttcggataatacaaattcaataaatacagaaaacataggctaataacttgcctctattttcatggcctttggctgcaccacatagattttgttcctatagccacaccagactttgtcatgtaccacagtcatgcaacggatggaatgatgaggccgtccaaggtctaagaggtgatagtttgacaaatcccactgcccatctttaaaaaaaataaaaggttatagtaaatacataccacctgttactcaatttcaacacaagaaacattttatttgttgtataattaaatttattgaggaagcactcaaagtaccatgtactaagtatatcttttatttgcagcctgggttcttttattccataagctgcaaagttggaagagaccctcaaaggtcatctgcttcaaagtgccacccagtacctagaccccctttaaaacatgctcacaaaagcagtgatgtgatgataaatcagttacaagttatctgtttatcataatatttttcgaattagaatggacttaaggttattttgggaataacgtctctcagtcacgtgcattttgatgtattttcttgggtagaagttgagggcaactcattgctaacactttaggaattatgcatactatattttcagtgatactagaaatatgaaggagaaccagtcatcagaacctcgctttgctttgttagcttttgtgagcatactgcctcacaaagcagccattctattttcagacacctttaattgaaaaatattacccacacctagctaaagtctgtctttttgtatgtaatcacccactcgtctgcagtcttgcagagtggaaacaaaagaataaatccagtacaaacttcttcgttacagccctatgtctcctcttttcaaaaccaagttatctttggcatgtgctctgtacctaccacagtttacagacccttcatcctaactctgttttgttgatgtccattgaatatgctgtctttatctagcctagtagagcaggattatcaccagccttgtctttgaggcttaaggcattaaactcatattgagtttatagtcaacctttaggtaattctcactcttcagacatgtctccccatcgtgctcttctgaactcaaatgcaggactttacattgacacttactaaatgcattttacttgtcttattctgtcaatattattttgaattcaatttaccaaaacatgcattgtttcattttttttctaggcttttccacttattagctgagtggccatgaaaaagttaccaaaatgctctgtgtttcagtttcctcatctataaaatgaggatgaccatggaactttcttaataatttactgtaaagattaaacatagataaagggctgaaaaaggtaaaatggagccctctcactctttgatgatatggagtcattaaccagcaattttcaggtaccaatcaattacaaaagcacctaactgtcatctactccacatttccccagcccagaaagataggagattttgggaaaagcttttctaaaatccaaattcagggtatctatgtttcataatacttcctagatataccaatcaagtgggtagaaaatgatgtatcatttttggttgacacaagtaccaaggagttacggaggaatacatactaaattccctcaacttaattcatttaaggtagggtttctgataccaccacccctctatagatgaaacaatggttttaaagggggagaatataaataaggtgacatgaaaatgattaaatcttacccaattaaaattctttaagaaaaagtccaaatgttaagtggacacaaattatttttaacacataggacattaaaaaaacaccaagtttctccgaattgcataagtatatgaatgaaaaacaaatgcctccctatcacattatttaaaagtaccagccgggcacggtggctcacgcctgtaatcccagcactttgggaagccaaagcgggcagatcacaaagtcaggagatcgagaccatcctggctaacacagtgaaaccctgtctctactgaaaatacaaaaaaattagctggtcgtggtggcaggcgcctgtagtccagctactcgggaggctgaggcaggagagtggtgtgaacccgggaggcggagcttgcagtgagctgagattgcgccactgcactccagcctgggcgacagagcgagactctgtctcaaaaaataaaataaaataaaagcaccataaaatgcccattgtggtaaacacattttccctaaggtatctgttaatgtatacctccatgcacgcactaatatatttactgatgttgtgtattgttagtatttattctttaaactgagtatcatttctttaaaacataaaccaatctacttaaaaatgctttgcaaagcaacaaattagtgtccatgttatacacacatcaccactcacccactcctctgtgaaagattgcaagggtgccgtcagccagggctactaacacgattcccttcacgtgtctgcaaacaggaaaggggagttcagaactctccattcaggaatacagaagggaccacatgctactgaactagttcaaggcctcacaaagggccaatctgtgatgagttaaggagctgacacctgaatataaatgaacacaccactttcttcactgtggatgtcctgctatgaaaaaatgtcagctgaactaaataaacagtatgaatggtatctcagttatttcactttctggcccaaggttctcctctcatcacagacaatcaacacaaactctaaagaccagagacatgcaccttgagtggaaccaacagagtcagccctgtaggctcagagataaactgtctgatttttttacagtgaacacatagaaaagaactagtaatcaatgccccaatcaacatatttacaagccataaagaatattctaaaataaacataacttaataggtattggttatttcctgcagtgctaaataaatcgcagtatggtgaggactcaatcaagcaagttatcctttctacttcgttttctattatacagtttcattctcacttaacttctctagttccataaaaagggttaaaaaaacaaacaaattggatactaatttagtcgtgaaacatgtattagctttcaaagtcttaaaatctagtttataccaaaatgcatagttttaacaagaagaatttccaaaataaaacttacacaatactgagaatcgaatctttaagtttaatggaatggagacatttcctccactgggctacagatgaatggacatacaaactgtaagaacaaagtcaacactggtaaggcatagagaacatcaagacattgcatatatctaacaatgatcgcgaagttcattcagaaggaaagaagagtaacatacaaattttaggaaaaggtgctgctgcttttgtgcaatggtcagaaaagaaaaatgagagtgagggtaggcctaaggtaaagaaataggctgctgagcaaagaaaaacatatgaagactgaaaagcaagaactagtgcaatgcacagtcaggttcacacacttagtccttgggcaaaactctttttttgaattgccttacctctctactacactgatctataacttttggatgacagagtggcccacatagggagtggcaaactatggcctacaggccagatccagtctgccacctgttttaatccagcctgcaagctaagaatactttttacatttttaaaagtgtgtgtgggggggaaatcaagggtattttacgacaggggagatttatatgaaattcaaactacaatgcccataatgctctactggaagagagttacactaagtttgccaactcttcactttatagtattggactcatatgaaaaagacatactacaggttgagtaacccttatttgaaatgcttgggatttctgactttttcagattttagaatgtttacatcatacataacagttgagtattcctaattcaaaaatccaaaatgctccaatgagcattacctgccagcatcataacagtggtcaaagagttttaaattttggattagagatgctcaacagtaatcttgcttaacctttgtaaatgcacaattttgtaaaactctccacacaaccggaaagtgaacaaaccatataatattagtcatcatcatctgactttgcagattgtgatttgttttacctatcttagtaaaaaattcactaaaagttgggattgggccttcctgcagccaaaatgttggtttaatccctgttttcctgcccacattctagcctacataaattaaatattctctgtctttgtgctgttcaggatcttctatttctggagcacctcgattttaaaattttacatacctcttcttccaagaatattatagaaagggaacattctgtgacaaagaaacatatggcttactattcagaaccagtgcaagtccagtttatgtggtagttgcaacataacatcaaattgtgtgtatatataaaattctttgcattaatccacactttttgtatttgtttaccatattttacttatcttctgatttcaaaagcaaaagtaaaacaacatattctaatgttaaaagcattgacacctaccagccattttgagctccaagccacatagttggtaaaagactactcattttctgggcttcttctctcaccaagtcttgttcatttggcagtactgatatttgatctttatatgcatctgagtcattgctggaaagggagggcaaaaggaaagaaatctgagtatacttaactatcgttatagttttcagggactgaatccttctatatttaagtttgttcatttgtttattatttatttattttttagagatagggtatcactctgtcacccaggctggagtacagtggcacaatcagggctcactgcagccttgacctctcaggctcaagtgatctttccacttcagcctcctgaataacagggactagaggcacacacactatcacacctggcttcaacttttagtcaaaaaaaaaaaaagaaaccaccaaaattccagaaaagccaaagtcaaaagcttacatcacatatttcaacaattgtaccagaaataacattaacaaactaggaagcccaaggagcagaaaagataataagacatggtaatgaaatacagcagttaatattcagacaattactatggctgtctcttattttgggttttgtcatagtttcttctcaagtgagagagaagggagggatacacacatacaaatagtagggagaaatataaagaatgacctaaaataaattaataaactgaaatatgtttaatattctatcacaaaacctttcctttgaattgtcagggcatatttagtaaaagatatataaccaggctatcaaattcaaacatgacttattcttaaattaataattcaggccaggtgcggtggctcacgcctataatcccagcactttgggagggtgaggtgggtggatttcttgaggccaggagttcaagaccagcctagccaacatgataaaaccccatctctactaaaaatacaaaaattagctgggtgtggcagcacatgccttcaatcccagctacctgggaggctgaggcaggagaatcgcttgaacctggaaggcggaggttgcagtgagctgagattgcactgctgcactccagcctgggtgacagggtgagattccatctccaaaaaaaaaaaagaattaaatattaacccatttatgccggaggttgcaaattttttttgtaaaaaatcagaccttagcgatgaccttgagcagtaggatatgaataactcccacaagcttagcattccaataatggaccactaggcataaatgggttattaattaatctttcttactttatacactaagaatattaaactttaaaaaggatctagtttaaagagactctcatctagaggggatctagaaaaggcaggaaagaaaataaaataattcactaaatgggcctagattaaccaaccctttaacggaggagcctaaaacaaacagttttctttggtttgtttgttttctgagacagagtcttgttctgtttcccaggcggcagtgcagtggtgatatcatggcccactgtagcctccagctcccagggctcaagcaatcctcccacctcagcctcctgagtagctgggaccataggtgcacgctaccacgcccagcgaatcattaagttttttgtagagatgagggtctcactatgttgctcaggttggtcttgaactcctggactcaagcaatcctcctgctcagactcccaaagtgctgggattataggcatgagccactggaactatctgagttgttttttaataaaatatttgcatgaaaactaaattcaaaaaggtcatccacacccatgtgggaaacttgtacaatggcagatttaaacaatggccaattttgctgataactggagtgaaaattagagtaggggtgggattaaaatgacaaagaattacttatagaatggaagacagtaagtacaaaaaaaaagaaaaaaaaacagatcagaggagaaaatgaacagaaagattttgactaatatatagtcacacacctggtaaaaccattttggaaaatgatggacagaatatatggtggtggttccacaagattatactactatatttctacagtaccttgtgcatgtttacatacacaaatacttaccgttatgttccaattatctacagtattcagtacagtaacatgctgtacaggtttctagcctaggagcaatgggctataccatatggcctaggtgtgtgataagccataccatctagatttgtgtaaatgcactctatgatgttcacacaatgatgaaatcacctaatgacacatttctcagaacatatccccattgttgactgatgcatgattatacttttatagataagattttttttttaaattggaaggtgtacagaagaaatgggggggaatatccagcgagaatgatggagcgggaatacatgaaattatcacaagaataggtatcttttaatccaccacagtgacactaattagtggaaatcttttgactgtttgagattattttggttccttttatttgtgcacttcacccagttgcctaagttgatgacccattattatacctcgactgatacactggggagaggtcttctgggatctgaactcccaaaggatctgtaaagacatgctctgtgtagacgccagtttgggagatgtccactgtgtcttcagctgaccccgcattcccttctgtagcttcagttgcttcttctgctgttggaacattttcatcaacctcactattttctgcttccatttctacaaagtaaataaaacactattccaagtctgggcttttctcctccaattatttccccacacaaacccctgttatagaattccattccatctacccactccttcacactgtaccatgaaattaagaattcttcattccatttaacagtcattacagcattttttttttttttgagacagagtcttgctctgttgcccaggctggagtgcggcggcgtgatcttggctcactgcaagctccacctcccaggttcacgccattctcctgcctcagcctcccgagtagctgggactacaggcacccgccaccacgcccggttaattttttgtactttttagtacagacagggtttcactgtgttagccaggatggtcttgatctcctgacctcgtgatccacccgccttggcctcccagagtgctgggattacaggcgtgagccaccacgcccggcctacagtatcttctttcaagttctttcaaccttgttacttaagatctaaattaagtccataatgaggcatctgagtgtagccttagactctatacagatggcaggtaaagagaatggatatacctggtggtttatccatcactggagaagcaccatttgtactaggggaagtggcagctcccgtcacaccttctgcagaacaaccaaccactgtgatgcctcctaacaggctgtctgtctctgctgagctgttgcttgtcatacttccacataaagatgctttgtctacctgaccagattctgaaagatcttctcctgcagggtagtctgtttctcgtgcacctgaaaaataaatcttcttgtaacagcaaagtaaacttctataaataacattttttttactaaaacaattacaggtttgaaatgagagttatgcaggtgagatgtacaggtagttgaatacaggtagcattaaatttacataaacaaatcttcacaatatgggaaggtaacttaaaaaattaagaaaatacttctattaacacaagtgcaaataaacataaaaatgtcagaaaataaacttttttttttttttttttgagacagagtcttactctgtcgcccaggctggagtacagtggcatgattcagctcactgcaacctccgcctccttggcttaagtgattctcctgcctcagcctcctgagtagctgggactaccggtgtgagccaccacgcctggctaatttttgtatttttggtagagacagggtttcggtatgttggtcaggctggtcttgaactcctggcctcaagggatccaccaacctcagacaagtcctaggattacaggtgcgagccaccacgcctagccagcttctgttcttagtgagctcctcagcagccacaggttaaaaacaatctattatatctgacaacatcagccaaaaaaaaattcttttaaatcatcaagactactgctactacttgaagtataagcttctatccattactgttaaaaattaaatgccccaagtatataggttgattaagatattagtaaaacattaaaaactaagcatttataatataaaaatatttacaatataaaaataaatctcattttttaatttagaaaattgttttatttatatcacactaaaaacttttattgcagtaaaaataatatatatataaacaaaatttgccactttaaccatttaaaagtgtacaattcagtggcactaatatttacaatattggcattaatatttataacattgtgtagccatcaccattattttttttttttggcgacagagtttcactcttgttgcccaggctggtgtgcaatggtacagtctcggctcactgcaacctctgcctcccaggttcaagcaattctcctgcctcagcctcccaagtagctgcgattacaagcgcctgccactgcacctggctaatttttgtatttttagtagaaacggggttttaccatgttggccaggctggtctcgaactcctgacctcaggtgatccgcccacctcagcctcccaaagtgtctggattacaggtgtaagccaccatgccaggtctttttttttttttttttttttttttttttaaaacacagggtcttactcccattgcccaggtgggtgtgtagtggtgcaatcgtagctcactgcagtcttgacctccccgactcaagttatcctcccgcctcattttttgattttttgtggaatgaggtctcactatattgcccagactggtctcaaacttctgggctcaagtgatcgtcccaccttggcctctgaaagtgctgggattatgagtgtgaacctccatggccggcctatttctaaagcttttccatcacctcacacagaaactctatgtttttatgaatgtgcctattctagatatctcatataagcggaatcatataatatttgtccttttgtgtccgacttatttcctttggcatagtgtttccaaggttcatctgtgttataacatgtgtcagaacttctacctagaggataatgtattgtactcttaaaaatttgttaagagggctgggcatcccaatacttcgggaggccaaggcaggcagatcacttgagcccaggagttccagaccagcctgggcaacatggtgaaaccctgcctacaaaaagtacaaacaacttagccaggtgtggtagtgtgcgcctgtggtcccagctacttgggaggctgagctgggaggatcacttgagcccggaaggtcatggctgcaatgagtacaatgagttgtgactgcaccactgcaatccagcctgggcaacagagtgaggccctgtctcaaaaaaacaaaaacaaaaatgtgttaagagggtagatctcaggctgggttcagtggctcatgcctgtaatcccagtacttcgggaggacgaagcgggtggatcacctgaggtcaggagttcaagactaatctgactgcccggggtggtgggtcacacctgtaatctcagcactttgggagaccgaggcgggcagatcacgaggtctaggagttcgagaccaacctggccaatatggtgacaccccatttctaccaaaaatacaaaaattagccgggtgtagtggctcgtgcctgtagtcccagctacttgggaggctaaggcaaaagaatcacttgaacccaggaggtagaggttgcagtaagccgagacggtgccactgcactccagtgtgagtgacagagtaagactccatctcaaaaaaaaaaaaaaaaaaagactagcctgaccaacatggtaaaaccccgtctctagtaaaaatgcaaacaattagccgggcgtggtggcaggtgcctgtaattccagctactcgggaggctgaggcaggagaatcacttgaacctggaaggtggaggttgcagtgagccgagatcatgccattgcactccagcctgggtgacagagtaagactctgtctcaaaaaaaaaaaaaaaaaaaaagtagaactcatattaagtattccacaataaaatataaaaaagaacttcattcctttttatggctgaataatattccaacatatggatatatcacatacacttctttaatttttaaactaatgttttaacatcacataatgtttaatccaaaactttagaagacctttccttattaattaatccaaacagtcctctggctcccagttattttctcatattcccattgttttattttcttcacagtatttttcactacctgaaaatatcttctttattcaatggtttccagtttgttttttaatcttccctaactagaacataagcttcatgacagcaaggtgcagaactgcatcttcagctgctacatcagtgcccagcaggtaggtggatggaggggagggcagagaaacgcatgactcactcttacctggcacacttgcaatgcacagaacatgagagttgcaaacagtgaaactgtctaggatgttgccaggttgaacagcatcaataataagaacttttgtagccgaatgagtgctggtacagatccaaactagactggataattcttcttgattttttaactccttctgctgttcctgtataggcaaaggaggaaaaatgtttaaaacaatatgtatgtacaaatattcataaggtggtgctgttacagtaaaaggcaatactatttcaaatttatttccagattatttggaagggtaaaaatacaaccactgatgtggtttggctgcgtccctacccaaaactcaacttgaattgtatctccccgaattcccacatgttgtgagagggacccagggggaggtaatttaatcatgggggccagtctttcccatgctattctcgtgatagtgaataagtctcacgagatctgatgggtttattaggggtttacacttttgcttcttcctcattttctcttgctgccaccatgtaagaagtgcctttcatctcctgtcatgattctgaggcctccccagaggttacctatgtaagcccaattaaacctcttttttccttcccagtctcgggtatgtgtttatcagcagtgtgaatatagactaatacaaccacctatcaatattaattagtagatgaaaaactagcagttaggctggcacagtggctcacgtctgtaatcccagcactttgggaggctgaggtgggaggactgcttgaggccagaagtgtgagactagcctggtcaacacagtgaaaccctcgtctctacaaaaaataaaattagccaggtgtggtggtgtgggtgtgtagtcccagctacttgggtggctgaagtggacagatcacttgagtccaggaggttaacactgcagtgagccatgatcatgccactgcactccagcctatgtgatagagtgagactctgtctctaaacagcaacacaaaactaacaggtaaagcagaacaatgataaaatgttccattagcttgatcactgtagtgattacatacgtgtacacatgtgtcaaaactctgacctatacccatttcgagtgcacactttattgcatgtaaattatacctcaatattttaaaattgattttaaaagggtgctgagggacagtaagccagggcatagtaatcccaattagaagctggacccagaggcaaattttggatgaaagagttaaactcatagtctcataaaccaggtcaaatgttagtacacacacttaccttaagttcctgatctaacttatctaaactactctgagaggcacttcgctgtttactgccttctgtatccaaaccagcaacatccttgtaaaatacacttgctccaacaacagaaccaccatctctggtcttcccaccagataaattgactccaacagcacaccacagcttctcaggtgaaaaagaaaacaatattaagtctagaaatgtttagcattttcatgttttcttaaaataactaatggttgtaaatacaggtcttataacctaatattataaaatgaacaataacctcaccatagaagtaatacttatacttttttggttttagaaaaaaaactacccagagtttagaaaacatctccttttaattcacaatgaacttaccttcattgatgtatctttttcatccagaggtctgagatagacaggcacaggtaaatttttcatcttattttcaccttgaccattggttacctaataatggtggaaggaggagtgaaaaaggcacattagtaagcctcatcaaaagtgaacttattacagatccactgagacatgagcaagcactgctgttatttactccttgaaatcaagttcaggttttttgtttttttgtttttttgagacagggtcgctctactgcccaggctagagtgcagtggcttgatcatggctcactgcagcctcaatctgtcaggcttaagcggtcccctcccacctcagcctccaaggtagctgggactacaggcacaggccaccacacccagctaattttttaaattttttgtagagatgaggtcatgctatgttgcctaggctggtctcaaactccctgagctcaagccatcctccaccttggcctcccaaagtgttaggattataggcatgagtcaataacaggcaccatgagccaatgacaggcatcagccaattttgccattcttatttgaaaaacagaaaaatcaagttgagcaattcaataaacaggatataatgggagctcaaaaagaggctctaattcacacatatgtgcacacgtgcacatgcatatgtgtttgtacatgaacatgtgagtcttttggggtaggaattatggagtagacagataaaattcctgaagacctgaacttaattttaaatgaacagtttgaaaagttccatgccaataattttttcaacaatgatgctggttttttaaaaaatgaaatcttcaaatattaaaccagaattgctctggttacagcagagcgggtacctcaaactccatgcacttagccaccctttattgactcctccccccctcacagactcagagcatttcatttgagttctacagctctagaaaacagcctgaaaaccaccaccctccatgcttaaatgtgtgcccagtccatgcggctgagatgagcagggctgggatgcgtacagtgaatccttcatgcccacgcacactcaacttgccctcttctttcctgctggatgctcttaccacatgtgcatattacctgtttgtacttctgaggcagactccagccaaaagcctgcactctaccgtcttccttctgaacatgtgcttttacctgacgatactgctctctcttttgttctctgcgtgaggctaaactagcttcagttctaaaaggaaaaaagattttcctaattacatgaatacgtttaattacgtttatccccagttttatctctcctctgtcactaaaacagcaaaaacaacaaaaatttacatgatttcaaattagtttatttcaactataacagctccttaaaaagtgttataataggccgggcacggtggctcatgcctgtaatcccaacactttgggaggccgaggagggcagatagcctgaggtcaggagttcgagagcagcctggccaacatggtaaaaccccgtctctgctaaaaatacaaaaattagccaggcacggtagtgcggacctataatcccagctacttgggaggctgaggcaggagaatcatttgaacccggtggaggttgcagtgagccaagatggtgccactgcactccagcctgggggacaagagcaaaactccatctcaaaaaacaaacaaacaaacaaacaaagtgttatactaaagctggtctttttaagtttgtgcagtgaattcagtgcctaagctttaacaggttaccaagcagctttgttacattaaattgaatcatcagccaccaaatttatatcaggtttcagatgctggccatatgaaaggggaaaattcttaagtatgtttggcttttttgttgttgttgttcattcaacaaatatttactgagaatatcctaatgccagaaaacgtgctagaagtgatttaaaacttgagtaaatcaatatctgcttaggaagattgatataggttagattttagatcccattaacttgtttcagaaaataaaaatgcaaactgatttggtaaactttggagttataaggtaaaatattattaaaatgattttgaaaataatttgccattattttggccatttaaattttcataagatgagttgctatgtatatataccacagttaacatatctacctatatgtcagatactttacagataactgtataattgggtccaatcacctttgagataggttatcagattaattttacagacagagaaactgggggctctgaaaggttaatttgcccaagtgtttgtacctaatgagtagtaaagtcaggatggaaaaccaagtcctctgacaccaacagaaatgttcaaacatttaggataaaggctcatttacctctaaaggccattcacatttctattaataggtatttatcaatgttgtcataccagcaaaaatgaggcatttaaaaaaaaatccttctcttttataaaaactgaaaagcaattttcataaaaacttttgactacaagtaatttacttaaagacagccaagttacagaaatgatttttttttttttttttttttttttttttaaagatggaatctcactctgtcacccaggctagagcaatggcatgatctcggctcactgcaaccccgcctcctgggttcaagcgattcttctgcctcagcctcccaagtagctgtgattacagccacacaccaccacgcccagctaatttttgtatttttagtagagatggggtttcaccatattggccagactggtctcgaactcctgaccttgtgatccgcccacctcggtctcccaaagtgctgggattacaggtgtgagccaccgtgcctggcccagaaatgatttttttatagatttacctgaatccttagagctgataagaggccaagaatattctgaaccactaacttaatttagaatataatgattaatttggaaaagacttactcttcactaaggaaatcaaaggctttggacttatccccagggagctgagataaggtgctgcttcttttcttgacggacggagtaacatgagacgtgggtgcattgtacttcagattaacaggtggttcaggcttcttagtcgtgttacttgaggagctgaaaagtcggctgaaactaaaagaagacagtatgtctgtgtgtcacatgtactatgagaaacaatccttgattttccacaaactttaatgttgaagaaaatttcagagtacttttacaaggcaatgagttagaaattggcaaaaacagtttttgtagtcatacgctgtagccttagcagtaactcgtagccaaactcagacattcagtgaagagaaactattgcttagaatggcgggtgcctgttctttaactagcaatttgtataatgaaagcaagaagctcttaaatagaggaaacttctcctactgaataaatatattttggtttttttgctagctcctacttggtgcaaggtaagagcgattgttaaaccgcaaggttatggctgtgtgatgtgaatggaagcttagtatgccagttctaaaaacagcttattataatcaagtactggaacacatattaccatgttaacacacattttatacattttctgattaagctcaatttaaacaactactttcgggtctatttcttttttaattgacacttccattaaatagcagattcaccaaaaaagggtaagttttaatcacagtaaacacatagtacttctagcacaaacataactcaagctcaatacatacacaatattactcaaaccctacaagcactaaatttctcatcttcactttgtaaagtttcttacaatcacaaaaccagccaatcagaaacttatttaatggggatccaggtcattttcaagtctctaaataattccccattatttaaatttggcagaggattgcaacaaatgcacagtcaacatgatgcagcttacgatatcatattttttgtccttgagaagagccttaccgagttggcacactatatattaaaaaaaaaaaaaaagttcagtttagctacttaaccattacccctagtttaaaaaaaaaaaatgaaggaaagaaaatggacataaaatcattcttggaaataaattttgactgtaattttcttgtctcatgtgctgtctaacatctttgtttttcaatacttacaactgccaaatgcttgacctttttttttcctgcatggctggattttctcgtgatgccctacattcaaaaagaaaagaaaagaaacatttatcagtgaggtattctacctttctttctgaagaacaagagacccaagaagttcatgggatacacagaggggagtcaacaattaagttcaataaatactgtagttactttgacctaccatgtgtcagtcaatctgctaaagattgactttaattctactaagaaaaataaaatatcatccctccctcaaagagcttagtctaccgacagaggactgtaatatgtgctagacagccaacatgcctgaatgatatttaaaattttttattgaaaagataccctctaactttcccttttattaaaatattgccttgtaaattcccatctttacataaaagtctctatcatctatactcggagctctcacaaaatagcttgaaactttggcatcctgaggggtcatttttcacaagactaaaacttttccatcactggaaagatgaccacagcagggaagaggataaactggattgacaggtgattcaacaaaatttcagaaaataagatattccaaattgatttatgaggtggtagggattctgccatcataatcagagctctcttttcactacttttttgttatgaactaaattaaaaacattctttacttcagtgaagtagttaaaagtaagctactatttcctttaatttgttgactaccacttggctgctagagttaaaaacagcaatggaaagtgaagtccagttgggcacagtggctcacacctgtaatcccagcactttgggaggccgaggcgggcggatcacttgaggtcaaaagttcgagaccagcctgaccaacatggtgaaaccctgtctctactaaaaaatacaaaaattagctgggcatggtagcgcacacctggaaacccagctaccagggaggatgaggcagaactgcttgaacccagggggtggaggttgcagtgagccgagatcacacttctgcactccagcctgggcacagagcaagactccatcacaagactccatctcaataaatgaatgaataaataaataaataaataaataaataaataaataaggtccactttcagttttttgaatatttacttattatttattcgatatccactaaatactgcagttaagaacatacactttctagtgggttagtttccttgtctaataaatatagattagaatactgatcttccttatgggcagttataagcaattactatcacagcaaattgtaaaatgatatgttaaaacacttgattctaatataacattggtaaagggtacataaactgtgaaataaatgatgtaatcctaaagaagtaaaagttggcaattagagaatgtgttcataaacttaaaaacaacatgtcaatgcatactattattggtaaatctgatatgacaatccaaactcaaaaatatgggtaaattagggggcagctcatttacaaacttttcagttctttctaaattaaagaaacactattactgagactacaaccattagatggcagcattgggtgagatttaagagccatctgactgaaagataccaatggaagggtgtacttggcatgaacagttagaaaagagagaaagaaatcaagcaagagtattttacagaaagacactgagtcaaaataatttattttcctgtgttgcatatgaaattgtgatcttttcctgacattactgggtaagtagtattgatttctatatttgaaaaatgaccatcattcctaagtaataataattgccttttagaggtcgtagtaacatcctccaagatcccttactggcccaaaaagcacctcctttgatcacattctgttgctaattctgagtgttactttaaaaagtctctcctagtaaacagagaaaggggcttggatcttacagggcaggacttaagttccacatgaaggaatattcaaacctacaaaataatagtaggaaaataatggagcgcttgtcatacaaaccgaatcatctctgtccatcgaacagcttcctgaagctccatcaatctctctttatactggtttcgctccatgagaacacgggccatttctactctagtaaaccgtttcctctgggctgtgggaatatcactctataatgacaagaaaatgacatatcattctggaagcttataaatgtcttggtgttcatctcagagttatgcaaaatctttcagtttttaagcattccttaatttttaatctagtagatcatttaaagaaaaatggctttataaaaacaaaatcaacaaagacttttttttaaaaaaatatattttttgagacagggccttgatctgttgcccaccctgaagtgcagtggtgaaatcatagctcactgcagcctggaacttctgggttaaagcaatctgcccaccccagcctcctgagtagcttggactacaggtacatgtcaacacgcctgactaatttttaaatttttttgtagagacagggtctcgttatgttgcccaggctcatcttgaaatactggactctagtggtgctcctgcctcagcttctcaaagtgttgggactacaggtgtaagccactgtgcccagccaacaaagagatttaaataatcactcatgactacaaagataaaaggcagcaatttaatttctgaatatatatacacagatatttgaacatattataaagaaatcataaagagtagtgtgggtctgttctcatggttcttaaaaatatataaaaaataaagctaaaaaataaaaagaatagtagggggctggacgcagtgactcacgcctgtagtcgcggcactttgggagtctgaggcgggtacaatgcttgagcttagtttgagaccagcctgggcaacatagtaaaaccctgtagccaggagtggtggcacacacctgtagtcccagctacttgggaagctgaggtaggaggattgcttcagctgggaggtcaaggctgcagtgagccatgaccataccactgcagtccaacctgggcaagagagtgcaatcctgtctttaaaaaacaaaacaacaacaacaacaaaaacaacaacaaaaacaaacagtagggccaggcacgatggtccacgcctataatcctagcactttgggagtatcactttgagcccaggaatttgagaccagccttggcaatgtggtgtgagatcccatctctacagaaaataaaaaattagccacgtatggggtggcgcacaactttggtcccagctactcaggaggctgaagttaaaaaaaaaaaaaaagcatagaattgcttgaggccaagagttcaagaccagcctaggcaacatagtgagaccctggctctacaaaaaataaaattaaattaatagccaggtggggtggcatgcacctgtagttccagctacttgggaggcggaggcaggaggatcacttgagcccaggagttcaaggctgtggtgggatatgattgccactgtactcctccagcctggaggagtgacagagcaagactctgtctctaaaaaatagtaataatactaaaataaaaataaaggatagtgcagattttaaactaaaaccaaaattgttatctacatagatttaatacactattgtaagtttcacctaaaaatgttgctctaccattattttaattcatgctctgtaacaatcgtcactcagaaaatagttataagttagttccatttatctcaaattaccaaaccacatactcacccaagaccagcattaagggtaaacttattacctagttaccaaggtactcaactataagagtcgctaaaataccaacataaatgcaaacagatggagacaactgtattagccagaattactcttagacagagtatgtgaatatagagtgagcacaggggtaagacctcaagggaacatggctcaagtcaacgtcctataggctttcattatccacattttggatcaaagctgaaaggtttgggacataagaaagacactaagcttagcccttagcagtcctcctcctttgttgttctgttatagaaactgggcctctcctttcaataaagttaaacaacaaatgataaagatcttaagtttataacacagcaagcccactagtaggtatgtactctggaaaggctactgctcctgcccacctggagacttctactgtaatgtttgtaacaacagcattgtaaaaagctgagacaaactaaatattccttaacaggaaaataaatacataaattgtgactattcattcaatgggatatcataaagtagtgaatatgaatgataactacagcactgtactacacggatgaatctcaaaaacatgccactgaggaaaagaagctggtctccaagactaaatgtagtgtgaaacacaaaaaaggaaaaattaaaccatatatacatatgtgatatgataaaattttttttttaagttaagcaaatgataaatataggatagcagctttctctgcaggggaggaacacagaatagttcaatgtctagtaatgttctaattatcagattgggtggtaggttcacaatgttaatttattatgattcataacctgcatgtcttacttgtttttgtgtgtatcattacataagatactaaaaaacagagactgaaggggcaccaagtgatcattctgtccaaaacaaccacatatctttggtctgacctttgacctgcaaacatttgttataagaatgattatgaggctgggctgggtggctcacatctgtaatcccagcactttgggaggctgaccagggtggattacctaaagccaagaattagagaccagcctggccaacaaggcaaaatcccacctttactaagaatacaaaaaattagccaaattagacttgtagtcccagctcctcgggaggctgaggcacaagaatggcttgaacctgggaggtggaagttgtagtgagctgagatcgcagaactgcactccagcctcggtgacagactgagactctgtctcaaaaaaaaagactaggggtatgctaaggatattagcaagaagctcatatttattcttctgtacttatgttcacaacaatatgaactaattgactagtactaaagttctagacttcatctttttaatactgttaaataatttttattattaagctttcatatttctaaatcaaaatttgaaacgaaacaacaataacaacaaccaaaaaccccaaaatgtcccagttggtcctcaaacttgaacatgcaactacaggtaagagcacagaggcacagagggaaaatgagcacactgcatggagctagaaagctcagcatctggataccatgcagaagcatgagctatcctattcatgaccataaacatgtctcctgacttttaaaaatctttatagtattatatccaaagcttacgtaggaagatcttcccgaaacaccaaaacatggtaaggtaagaaaaaaagtccaaaattgtaaacctacatcatcgtcatcttttgctttttgccttgcatcttcagcttctgcccgagctctagtggggaaaaaacaaaacaaaacatgttatttgaattgagctcatcttttcaaaaaaataagagtaggtcaacaattttaactaccactaaaggattatttttcttttcccaaacagggtatttagccaccctcatttggtggagtatcatcatatcatagcattgttcagaaataaacaggtattaaagaaagtgggataaaaaaataatgttttaaatttccttattatcaaaacaaagatgtttgaacagtctctaactctttttgcatcattatagacataaaaaataacaatatttaggccgggtgcagtggctcacgcctgtaatcccggcactttgggaggccgaggcaggtggatcacctgaggtcaggagttcaagaccagcttggccaacatggcgaaaccctgtctctactaacagtacaaaaattagctgtgtgtggtggcaggcacctacaatcccagctactcagaaggctgaggcaagagaatcgcttgaactcgggaggcagaggttgcagtgagccaaggctttgccacttcactccagcctgggcaacaggagtgagactccgtctcaaaaaaacagaaaacaaaaaacaaaagacaataatatttagatgacaggctaacaactggaggggcctgctcacagcagaggcaatgggctggggcactttgccctctcccaggcagctcttggccttccaggcttgagtggacagaaggtctcagtctcagggttacatctgtaaccctttgtggcataactggcaaagagtttggtttagaacaacacagttaaaacttacttcctaagctcttcctccaattctctgttcttttcctctagtttcagtttggcttgcttcacagcctccaattccccttgcagcacatctttctcacaggtcagttcatccacttttgctatcaaatcattcttcactatgttcaaagcatttctaagaaacacatatttcaagtgcatcattacaaataaatattctttccatctttcagctattcctttgtagactaaactgtacaaccatagacaataataatttaatacttcaagacattctacccaatgttgtttgtagataaatgcaaaaagaacacaaagcaacagtctaagattttactcatttatcaaatgaataaaacaagacagatcatcaattactaaaaagtgagaagattaaattttaaaaatagcattcaaaaggttactattgttaataattcctcagaatatattacccaatcaataaagtaaaattatttcttgatgttacctttaataaataatgagaaaacagtttaaactggaaagttaagacagtctacgctgaagaaaaaaccctgatatccagttcctttgggtatagtgggcataggaccttattataactgcattctgtcttggatatacacagatgttccaaagttgctctgacacagcaaactgacaaaggaacccagtcagcttttccacatgactggggatctgtcccattaaatgtgtctgagggcttaagactccacaaattgcacccaagaatgcacagctatggaagacagctctgaagaggaaggctgagtatacatgaaaatatttgtgtggaaataaaagaaaccccaggagaagagataagaaaacagacaaatgttaagggagggagcaaaaaaagtgtaaaaccaggacaaatttagaagattaagaaaaaggcatggatacttatagagtgaaaaggagatgacaatctgtgtttctacaaaaaaacagggcaagggaacatatctaacagggcagtgtaggtcccaacattagggtgtgtgtgtgtgtgtgtgtgtgtgtgtgcacactcagagttggggaacgagatgggacagggagattccattagtattatgttaaaacgatgaagtgtcattgacttggacaagaagaaaattctttatcttctgttaaaatttcacatatacttacttggtttccaacagttgtgtattttctaatataagattctcaacttcccgacccattcctatcaaacgaaaaaagataaagactttgaaaataaatgcatcaataattatatacatttaaaatataagctatagtcacaagttttattttagaaattttatctgtcctttattaattttattttgtctataatttcatttgatggacctactttaatagattataaaattataaataattattcattacgaacaaggctaaagattttgttggcctatttcttttttaaatctgaatcggcttgctagggaatgaggccaatttttaatatctgttagtctatatttctcatagataatatttcaaaaggatcaagacttttctgccaaatattctaatattccaacactacatagggtaaaaaagaacagctttaatatggatcgaaattgtttctaaatcacatctgacctcgtaggcttttgcctaaaaattagaccttattaatagagaacaggcaaaaacaaggctaaagaaagatagaaccccaaggcagatgaaaccttaccaaagaaattatggtcttaaagcccatgcattccatgtaaagcaaaaacaaagaacaagaaatgttttacgtaagaaacagcatgaaaacagattattaatctataaagttttatacatgatatgaaaaacatctggaatcacaatgttatgatttaatgcataatgatgtgcaaaagacagaaataaagatgatttccttcattcataaggatgctgatatacctaaaaaatgctttaccaattctttctcacaataagattaactataattagattgaaaatcttcaattaacaatacaaactttccttcaaagtgccacctataaaataataatgttcagttatcacttgagtgaatgtctttgatcgtgtttggcattttaatgactactgtgagataagcacgtagagcatccaatgcaagatccaatggagtggtctttagggagaagaaagctattaatttgcttttcctaagaaactgaagaaatgaaataacacactagggaatatcactcaaaaaacaaaaaatcaaagcaaaacaaaacaaaacaaaaaaaacccaccagtcactcatcttcaaggaattgtgagctaataatgttggaaaatcacatacaatggaagaagtaataatcataacccaagtaaacaggaaagaaatctttctaaagaaaactacatacgacaaaggagttaacatgtccctttattttaaaaaaggtaattttccaaatgatttaaaaattacttaaaacaaaaacagccaacctaggaatgctacatattctgtgtacctggactcatattttgtctatattctaattttctcaaagatcagggtacttacaccagaaagaattaaatatcagaaatagattaatcatctacctatgtattatctacaaactgaaaccaaacaaaacaaaataaaagtcccaaaaaagtttccaaattctaactccaaaatgatcttcggcaagatatttgctttaaacactaatgctaaatttttattcctttgtagatacaatggctgggaatgttaactttttaacaaagttatagagacagaagaaataagaatgtagactggttgaaaacagtttatatagtaactatgtttgctataaactctcaagcagttagataagcgtggaagctgaaaatatatgaaaggcaaaaaaatagttgagcagaaaaaaatgatgagaaagcattagatgagaacagcagccaagaacacctagcttaaaaagcagtaatattaaaatattcaaaatcatacacaccagaatattcccctacgtaagcagcccaagagaaaaatgaatgagaatctcaattagattgttttcagaaagcaagaactaaactcatttactttaaaatgagagagaggaaacaaagaaattgacaagatgtagagaaaccattaactaaacacaatgaagtgtaaatatttataaaaaggaaaaaaattgaaatgtgtgctacaggaaaaacaaatcctataatatagtttctaaagtttacattagccatgaagccagtagacaagacagataattctgtaaactggagggtatacaggacatttttgaaaaggtacaaagtcctcagtgggcttagaaaattcaccgtatgatccatatattatcctacttggcttgcacgtctttgggtgcatgaatatactgctactgcgtcctcaccatcacctaaatgtgactcagtctgtcccactataatatgttgtgaatttccttgtattgtacttctattgttggtctttttgcatcaatgatacaacagcaacaacattttaaaattatcattaaaagattaactggcaatgtacagagcttactcttaagggaaaacactacaaaaagtcatgaggataccaaatggaaacacatgatggtgcctttgagtctgcatgagacccggatgaagtagaaataaagcctttccgagatggcaaaaataaataaataaagtttacattaaatgtacacattcccaatgaagagttatcttaatatatggtgtataaattgaatatataaccaataggattatctaaaatttcattttgaaatgatcaataactctttataagaaaaacataaagtggcctcatttctattcaagacttaaatgaagcacaaacttaggtctaatacatttgaaaactttacttattaaaaacaagcaaaataaaaaaaaaactgcctggcagtttttaaaatcacagaagtttcatttggattttaacactgattctcaagctaggtccatagatgagcttcagagttatatggtaatcccttgagaagatgcacaattttatctagttctacatgtgtgtttttccaaaggtacattgctctcttacaaattcacctgtgaagaatttttaatcccaaaaggagaagaatcaccgattttgaggtgaaacaaaactgtcagaactatttagcaatcccattcactcagttgctatgtgctaaatatgcaacagtgaacaaagacacagttgtctcagccacattgagcttatagtctgtccagggagacagataactaaaaaataacagtaaagtatgaagagtggtataataaaatgcagtgccatgggaatacatttcagggaaaactaagctttaattaggggatcaaggcagaattcctggaggatgtatcacttaagcaaggcaagaaaagaaaaaaaaaaaaaaatatatatatatatatatacatatatgtatgtatacacacacacatttaggagagggaacaaacaagccttggtgattagctgtgagggaaagtgagaggtgcaggatggagagctattcattcactaaaacagtgcctgttggtccaagagcagccttgggggacagaacaataaagataacaaactgagctttatacatgtcaaacgtaaagccctccaagtcattttaggggtgtctagcatgcaattaggaaataatagtcttgggctctagaaaaagatctgagatggaggtaaaaacttgggagtaattagccatgaaaaccaagaaacaatgagagcaaacatgatttcttaaacaaagtatcaggcctaggacaggagcgctgatacctgaaagacgagcaaaggaagcggatcctgttaagatgactgaaaaggtaagagtcgagacaggaaaggacacaggcaagttgatatcacagaaacccagcaaagagagttttaaataagaaagttgagggatgagacaccaatcaagataaaggacaaattgttgagattcttttaaattagtaaaatcagaaaaaggttgcgctggcgtgatggtgcatgcctgtagtcccagctacttgggaggctataggcaagaggattccttgagcctaggagttccaggacagcctacacaacgtagtgagatctcacctcaaaaaaaaaaaacagtaattgaagtactgagtccatatataatgattcaaatttgttatcactgaattacacagaagagaagccaaggactttttttttttttttgagacggagttttgctttgtcactcaggctagagtgcagtggtgcaatcttggctctccgcaacctccacctcccaggttcaagcaattctcctgcctcagcctcccaagtagctgggattacaggtgcacgccacaatgcccagctaatttttgtagttttagtagagatggggtttcaccatgttggccaggctggtctcgaactcctgacctcaggtgatctgcccacctcggtctcccaaagagctgggattacaggcatgagccaccgtgcccggccaggaacatttttatttaccatctttgaccaaaaatattcataagtaactaaacttacagtaatatattaaaatattctaatctgaactattctagagataaatgtatcaacatctacaaaatggaaaagatagtttgtagtctgtttcttatcttcaaagtggaaaagaaaccaaagcatcaggatattacttttaattgatttaaaagacaacagatatttctaagtactatggggcttctaaatacttcataagaaaagaaagtttggggccaccaaccttaaacattttatcactcattactgcattatgaggtaacacagtgtacaaattatattcagaattacttcattcttgttaatacaaacagcataaaggaattttgtggggtgatgtatattgattctggtgaattttactgcactgaatatacattttaaaattcttctaacattttttcatctgctcctcaaatttgccagggagttagtttctcaaactaattatgccttaaaagaaacttttcaggtataatttgatgtaaactaaaattaaaacataaaattaaatataaaaatggagtattccttaagaattaaactttcaggccagacatggtggctcatgcctgtaatcccagcactctgggaggccaagacaggcgaatcatgaggtcaggagtttgagaccagcctggccagtatagtaaaaccccatctctactaaaaatacaaaaattagtcaggcatggtggtatgcgcctttagtcccagctactcgggaggctgaggcaggagaatcacttgaaccagggaggcagaggttgtggtgagccaagatcgcaccacggcactccagcctgggcaaaagagtgagactatgtctcaaaaaaaaaaaagaattacaactttcttagccctccatgagaaacgcaattcattcaatttcttccaaagttttacttaaactttaatggtgacaatccctttctgtctaactatatgtacttaaaatactttcaatctctcttactagatactttatttatttatttatttatttatttatttatttatttttatgagacgggatctggctctgtcacccaggctggagtgcagtggtgcaacccaggctcactgcaacctctgcctcccgggttcaagccatcctcacacctcagcctcccaagcagctgaactactggcatactccaccatgcctggctaattttgatatttttcgccatgttgcccaggctggtctcgaactcctgagctcaagcgatccacttgccttggcctcccaaagtgttgggattacaggcgtgagccactgcaaccggcctagatagacatttagatagaacttgtgttttccttcaaaaacactttacaatgtcaaggacataactggcaatcaataaatttaacataaaataatgcaagcaatgtcactccactccaaagtcataacaattaacaaacgaaaccttttgagaacagtgtaatctgtactataattataccaatagatacaaatttttttagcttagtatctccaaaggtatatatttttaattccatatagtttttaatttctatagggtcctaagttataaggaaggtataccaaaactaattcataggagccagaaccttgcactgaaaggaacttcagagatcatctagggcaggggttggcaaactctttctataaagggccagacagtaaatattttaggcttcagatttcagttgcctactcaactctgctgttggtaggcaaaggcaaccacagacaataagtaaatggtggtgtctgtgttccaataaaactttatttacacacgcacacaaggggtcagctggatttggcccataagcggcagtttgccagattcctgaactagggtccagctccttcattttacacacaaagaaattaaggtccaaaaaggttaagacacttggcaaaggtcagcaggcaaatagtctaagagccaaatgcaatattcttttcagaccatgtattcttctagaacacaaactttaaaatgattatatttaccatagggctaaaacataatatactctgagaaaacttagaaaaatcaagtgttataatttcttatttaattaaagtcaacagaatataatgaaatttatgtaagccaggggataactaggcatcaatccatacacacacacatacacatacacacacacacacacatacacacacacacatcaccatgttcttatgtgtagttatctgttttgaaatatagcaggagttcaataaattgtgttgtatgaattcaaaacatgaatttaaatgcaattcagttttaagcatacccatatgcaaaggtgctttcatttaaaactttcatgatcacaaagaatatgttcccaataattacctaaaagggcaataaccctgtatcactgagcagttggggacattttaaaggacttttcaattaaatcatttaaaaaatcaattttaaaaacagtatgatatttcttcagatgagctatcatacctagtaaatctgctccttcatccacatctcctattaggcctgagccagctgaagacagttcttcaaagagagattctgtattgcgatcaaaagctttgttctctatgcctttggtgggagtgctatgcaacaagaacaacaaaaccaaatcaacaaatgacaaagacttttttgacgctgtaaaatgaatacaataggctaagctacataggactttcttacctataatttacgtttactagaaaatataacttaaaaagatttctcaaaggcttcctaagaaattctcactaagctccatggaaatagctggtgaagaaattatagaatgtttttgttgtgtgatcccagcaaacacaagcaataatggcagctcctctgctctataccaggtgctggtctcagtgcttcccatagattacctatgtcacaagaaggcaattatgtatgtaaaagctggttagagtagcatttctcacagtggcaaaaactgaaatgacctaaatgactgttaacaggggacagatgaggtaagttatacacatacaaaattaaaatttttacctttaaggttaaaaacataaatagagctttataaactaaagaaacccatgatacaaaggtttttttttttaatcaagttgcaaaacagtgtatatactatatgccctattttgcaggggtgtataggggaatggggaagtgtatatgtttgtgcctgaatactattattaatagaaaaaactctgtagaccatttccagctaaatatggtggagagaacatagtcatttatcacctaataactcagaagctcaactaaaatgaaagttaagaaattaaaaaggtatacacccaaaaggacaaagagaatagaaaaagaaactatagcagatgaaatgtgaacaaaattctgtaagatggaaaacagatgggcaaacagtagaaagtgattcaatagaccagagaaagctgaaacctaagccactggggtttagggaggaggtcaatatgctgccagaacccctgaaaggcctaggacttgaaggtaccagcaaccacagggagggcatgcagggaggaacatgaaacagaaggacaggattaaaaaaactgtacaaaaggcggtacaggacctagacacaatcctccagaacagtgagacctcccttctcttggcacagctccctaataatggaagccaagtttaaatgttataggcaggaaagtggagaatcagcattatttacttaagtatgaataaaacagccacagagtaccagatgtctaaagaaggcctctattataaaagaaagggcccaaaacaaagaggatgtgacagagacactaagagcaaaaaaagacaatgcaggcagcagcaacaacaaaaaaacaaagcacttaattttcttcagaataaatgttgcattcgtaaaatagcaagatggtataaaaagtaccaaccaataaaaagaatttggaaaaaaaaaaagaatgagggtttaaaaaaaaatctgccagcaattagtataaaataaaagagataggaaagaggggagaaaataaattatgacagtcactccaggatgttcaatgcatacctaagaggtgttccagaacgagagcagaagaaacaacaataagaagaaagagataaaatttcccaggactggaagataggaatgttcagatgaaaagacttacttcatataagaagatacaaaaaagacacctacaccaagcacagtatcattaatttttaaaaaatcaagaaagtgacaatcttaaaagatttcagaaagtatataaaaatgagcaagaactcaaataacaacaccctgaactcagcatgaaaatgaagtaatgtctttgcaattctgatggaaaaaaaatctcccaacccatatagttctttatctagccaaactatcaagtatgtcttcttaggaaatttgtaacattcaagttcatagtgctcaaaaaaaaaaaatttacttgtcatgcaccctttgccaggaaacctagtaaggatatgttccgtcaaaacaaaggcataaatcaagaagcaggatgatgtggcatccaggaaacaaaagatacaacagaggagaaaggtgaaaagaattccagggatgatagtgagggcatattccagaaccagaacaaatatgacagcagtctcaattggagaatgggaataggaggctgcaggagagtaagccctaggaaacaggcaggttttgtgtttggtcatattggggacttttacatttatgaattgcatagtgtctgccagtgatttagtaacaggtccacagaaacataaggaaaagaaacaaaataacccaaggctttattaatttcagaagaacaaaaagttgtaaaagaaatgaaatgggccgtagcagtggctcacgcctgtaatcccagcactgggaggccaaggcgggtggatcatgaggtcgggagtttgagaccagcctgaccaacatggtgaaaccccgtctctactaaaaatacaaaaattagccaggcatggtggctcacgcctgtaatcccaattaggatgctgaggcaggagaattgcttgaacctgagaggcagaggttgcagtgagccgagatcacaccactgcactccagcctgggcgacaaagcgagactccgtctcggaggagggaaaaaaataaaaaaataaatgaaatgtaattatactgtattctgtggctaagtagaattacagattaattttatatagtcatactgatataaataatgaatttaactaacagaatttgaaatatataatattaggaggatgaaaggatggtggtttaggcattatatcctcatctactacagaaagccaacagctagcatcacagcctttttcaaccagggttccgtatttgatctacaaaatacagaaaaggatttaagtgagtattttttccattctcccaaggtaagtacatacctagaatcctattctagacgcacaggagcatagctaattcattatatacaagagatgccttagggcattaggactacattttctcacagaatctcagctgaaaaagggagggatgaaggaggggcaggacgaacatgttattttagatacctgaagacaaacagcataagagagagctaagaagtgatagagttgtgcaccctttacccagaaagctagtaaggatatgctctgtcaaaacaaaggcataaatcaagaagcagggtgatgtaggatccaggaagaagagtggcgacagaatgagaacctgtctgagagagagagagagagagagagagagagagacagagggttctggatttgaatcccaagtccacctcttgctagcttggtaatctgggacaagctactttgaacaagttctaagtctctttatttataaaataaggataaaaagatctacctcataaggttgtaattaggatcaaattatataaaatcatgatgaaaacaatattacttaacatttattgaatggggcattttgcaatgatttatcatatattgattcatttaatcctcacaaccatctgaggtattaacacaaagctgttttataaatgagaaaacatacctaagattcaaatccaagacaggatttgaacccatgcagtcttactctagggtctatgcttttaaccgctacagagtactgactgcacaatgcttaacagagatcaataaatggcttgtatttttatagtcattaattaattaaaggatcaactttatggaagaaatgaaaagaaaggcagtagctcctgtctgacattcttgagcatcaatgtattttggataatcctgattaagatgatatctaatctcccagcactttgggaggctgaggcaggcggatcactggtgctcaggagttcaaagttcaagaccagtctggccaacatggtaaaaccccatctctactaaaaatacaaaaagtagcccagtgtgtgcctgcagtcccagctacttgggaggctgaggtgagagaatcgcttgaacccgggggagggggtgggggtgggagtggggtgaaggttgcagtgagctgagatagcaccactgcatccagcctaggcgacagagcaagactgcatctcaaaaaaaaaaagatgagatctaactattttcttcctaccactaaacagccttcccatgtaaaatgataccaaaatgagactaatttcttccaataatgagattacacttctcaagatggaagtacattctctcttcctgatctggtggaaggtacaaaagtttgttcaaacttttttgttttgttttttaaatcacatttatttagcatatgtacacataaaaaagaaatcaccttctgaacccacccagcagcaggaaacatgcacaaactccaggtaagtgctagggggaggggccctggacccaagttagtgtccgggacaatgcaatcttgtgagtaacaagccccagtcaggagggggctggactgaagtgtccggcaggctggagtacccggctgctggccctaaaataagcatgctccatagccaacggtgtgtttcatgccctcaaagtagcaccgctgccagccctgccatgtccactctgttacttccttcactcccgcttcttggttttttcaagttacagaaagtatgggatatgtcttggctgtcttttttcccctatctgctatagtttgaatgtgtcccctataaaattcagctgttgccaatgtgatagtattaagatggggccttcaagaggtgattaggccataagggcttctcccttataaacaggattggggtccttatagaataatgaggctttatccagtgttcagggctcacttgtccttcttctatgtgaagacacagagttcctcccctccagaggatgcagcaacaaggcaccaacttgaaagcaaagagcagccctcaccagacacctgaccctgccagcaccttgatcttggccttcctagcctccagaactgtgagaaaattaatttctgttctttataaattggccaggtgcagtggctcatgcctgtaatctcagcactttgggaggccgaggcaggctgatcacctcaggagtttgacaccagcctggccaacatggcaaaaccccgtctctactaaaaatacaaaaaaaaattagctaggcatggtggtgggtgcctgtaatcccagctactcgggaagctgaggcaggagaatcacctgaccctgggaggcagaggttgcagtgagctgagattgcaccactgcactccagcctgggctacagagcgagactccatctcaaaaaaataaacaaggctgggcgcagtggctcacgactgtaatcccaggactttgggaggccgaggcgggtggatcacctgaggttgggagttcgagaccagcctgaccaacatggagaaaccccgtctctactaaaaatacaaaataagccaggcgtggtggcacatgtctgtaatcccagcaactagggaggctgagggaggagaattgcttgaacctgggaggcggaggttgcggtgagccgagatcgcaccattgcactccagcctgggcaacaagagcgaaactctgtctcaaaaaaataaacaaataaataaatatataaattacccactctggtattttgctatagcagtacaaaatagactaagacaccatccttcctgctcatacacctaatttgtgatcctgcaaagataacatttaacaaaaaatttaaaccatgtacagtgtccagtttcaagaataggaattagaatataatactaacatttcttcaacaaaacatctgaatccattttgtccagagactggagaacagtgtttatgggagttgggggtggggggcgcagaatatgtcttcatctaacatttatgttaccttgaacctttatatccactgagatctttgtccatatccagctcaggagtagattcgatgattgcttgaacttctgacttttcttcattttcagcagagccttaaaaaaggacatgatgaaataaacaatacatatattacacagtaccccaatataaaaatcctgttgtttttatgggtgtaaaggtatcatttgaacatttttttaaaatgtgcaagactggattttaggaaatacagcattatacaatatatcacatattcagttaacagattgtatcaaaaactaataagcaaccaaagaaagttttcccttgtgtttcgtggaacacacagtacaatgtatccaaggccctgctttcattcttatttaaaagatggaatttaaaggaactaaagacaaagactaaactaagataggggacagaaaagaactgtcctcccgtcttttgggttctgtgacctcctggcccccaactcctggccccaatagtttctctccaagactatttaaacattacctcttttaagcttatttacaattgaatacaattaagtgcagtcttatctcagtatccatgggggattggttccagaacccaccacaataccaaaatccatggatgctcaggtcccttatataaaatggcattgtatttgcatacaacttatcaatatcctcccatatactttaaatcatctctagattacttataatacctaatacaatgtaaatgctatgtaaataattgtcatactgtactgtttaggggataataagaaaaaagtatgtacatgtttagtgcaggcacagctatcatttttttttcaaatattttcaatctacagatgcagaaccacagatatagagggccaactatatctgcctattttataaatacaaagcaggcaacacccacaaagacatattttctcatacccacattatccaggtttactgaatactttcctagtaagtaaagaactagggtcactcaccagtagatacatttctagtttcctgggctacctgtacttcaatgtgtttgcttatctctgatttatttggcgcatctgtaaccttcacaaatccttcgttttcttcctttaagggagtatcagtaggaattgttgccacatctgaattagctgttgatgctggagtggtagctttagatccgccttggctaacatcagaaagctcatcctacaaataaaaataatttaaaataaaattttaaatgacgaatttactctaaaccacattaaatgggttgagaaataaatctaccaaagaaagttctatttttttttccaaaataaaggcaataaagagccactgattaccggtaagtactctctttagaccctctgcaaataatcgggaaatatttaagtaaactgtattttttcaaatgatatttttctaaacagaaaatttgaaaataaaagaattattagcaataaaactatacattaatgtcaatatcattcttaatggcaattgcaatattgtacagtcacttggtaataaagacctactttagaacatttagaacacatactctgtaatagctgatctaaaacagaagtagaataaccaaattcttaacctcgggtatctttgtaaagtgtggtattaaaatatcctgcatctaaatcatttgaagtgcttgaagtgcttgttaaaacgccgtggctcacacctgtaatcccaacactttgggaggccgaggcaggcggatcacgaggtcaggagttcgagaccagcctggccaacatggtgaaaccccgtctctactaaaaatacaaaaagtagccaggcatggtggcaggcacctatgatcccagctacttgggaggctgaggcaggagaattgcttgaacctgggaggcggaggttgcagtgagctgagatcacgccactgcactcccacctcagcaacggagctagactccatctcaaaaaaaaaaaaaaaaaaaagcggggagagggggcagattccagccacgcacatgcctgtaatcccagctgaggcgggaggatcccttgagcccaacaagaccctgtctctttgaaaaaagagaaaagagtagggagtagggaggagtagacagagtctaagtccaactccagacttaatgcaccaaactttgggcagtgagaataggtcatctatattttaacaagcaatccaggtgagttacatactcattgaaatttgatcactattataggatctacagataggtttcaagaggtatatgcaaattgaaattgtatgcaaaaatttgtgtacaatgtatttctctgggaaaagaatcatagcttttatcagatattcaaaggggtttgcagctccaaaataattataaacaattgtccagtggctatcaaaaatgaagcagttcttttggagcacccaggttttaagaaaagagaaactgacaaaaagtttacagccaccaccactaataataataataataataataataataacaataggccgggtgcagtggctcacgcctgtaatcccaacacttttggaggccgaggcaggcggatcacctgaggtcgggagttcaagaccagcctgacaaacatggagaaaccctgtctctactaaaaatacaaaaaattagccgggcatggtggcgcatgcctgcaattccagctactcgggaggctgaggcaggagaaacacttgaacccgggaggcagaggttgcagtgagctgagatcgcatccagtctgggcaacaagagtgaaactccatctcaaaataataataataataataataataataataaatcagggttagggtaaattaagtgaatttatcattcactaaatgtatgaccttgggtaagtaatgtattctttctaaacctttgttttatcatctgtaaaatatagataacagtatctacttcttaagattcttattaagttattctacattatggcttagcaatgtgtttcacacatactaagaatttaaaatattaactattattataatagtaactatttgtataattctaaatacataattatatatttttataatttataactattataatagtaactattagtataattataatacataattatatatttttataatttattaatttataatattttaattataaattatatatactatatataattcccttaagggagtatcagcaggaattattgccacatcgatttagctattgatgctgaagtggtagctttagatccaccttggctaacatcagaaagttcaacctacaaatagaagtaatttaaaagaaattttaattgagtaatttattctaaagtactttaaaaattggttaagaaataaatttgcccagagaaagtcacaatttttttaaaaggcaataaagagtcaccgattatcaataaataatctctctagctcctctgcaaataattgggaaatatttaagtaaatcgtatttttccaggcgtacatgaaattcttcttttttttctaagacagagtctcgttcttgtcacccaggctggagtgcagtggcataatctcagctcaatgcaacctccaccttccaggctcaagcgattctcgtgcctcagtcccctgagcacctatgattaccggcgtgcgtcaccatgccccactaattttttgtatttttggtacagacggagttttgccacgctgcccaggctggtctcagatgcctggcctcaagcgatctgctggcctcagcctcccaaagtgctgggattacaggcgtgagccattgcgcccagccgatttttctaaatagaaaatttgaaaatacaatacgaaaggcattagcagccaggctcggtggctcacgcctgaaatcccgacattttgggaggcccaggcaggcggatcacctgaggtcaggagtttgagaccagcctggccaacatggcgaaacccgtaatctactaaaaacacaaaaattaggcatggtggcaggtgcctgtaattccagctacccgggaggcagaggttgcagtgagctgagatcgcaccaccgcactccagcctgggggatagagcgagactctctccaaaaaaggaaaagcattagtgataaaattacacactgatgtcaacatcattttaatggcagttgcaatactgtatcactattaattacagtatattgtacatattaattataatatattgtacaatatattttacacaacatataaaaataaaatagcatatccatgttaagagtacaatactttggccaagcgtggtggctcatgcctgtaatcccagcactttgggaggacgaggcaggcagatcacctgaggtcaagagttcgagacaagcctggccaacatggagaaactccgtctctaaatcagccgggcgtggcggcacacgtctgtaatcccagctattagcgaggctgaggcaggagaatcacttgaacccaggaggcaaaggttgcagtaagctgagattgcaccattgcactccagtctgggcaaaaagagcaagactctgtctcaaaaaaaaaaaaaaaattgtacaatacttcatgtatgcctgtaatcccagctacttcggaggctgaggcacaagaatcgcttgaatggcctgggcaacacagcaagatcccatcacataaaacaataataatgtattgtacacttaaaatttttagagggtagatctcatattaaatgttcttaccacaataaaataaaaaaggctgaggcaggagaatcgcttgaacccaggaggcagaggtttcagtgaggcaagattgcgccactgcactccagcttgggcaacagagcaagacttcatctcaaaaaaaaaaaaaaaattggccaggtgcagtggctcacgcctgtaatcccagcactttggaaggccgagataggtggattagttgaggtcaggagttccagaccagcttggccaacatggggaaaccccgtctctactaaaaatacaaaaattagccaggcatggtggcacatgcctgtaatcccaggtactcaggaggctgaggcagaggaatcattgaacccaggagacggaggctgcagtgagccaaaattgtgccaccacactccagtctggtgacagggtgagactctgtctcaaaaaaaaaaaaaaaaaaaaaaaaaaaaaatgctattttcttgaattggtaactggcacccaatataaaatataaaagtatctgatagaaacctactaattccagcaaattcatttgtttggagttgagtcaaaaagactgacagtattaattaaaaaaaaaaaaaactgacagtatttaacacctctggagccaaagagattgatagtgaaaacaactacaagtccctctgagcaccatttgcattgtctttgctttgatgtatactcgattaaaaaataagtggtatttggctggacacggtcggctcatgcctgtaatcccagcactttgagaggttgaggtgggcatatcacttgagcccaggagtttgagatcagcctgggaaacctggtgaaacactgtctctactaaaaatgccaaaaattagcccagcatggtggtgcacgcctgtagttccagctacgaggaatgctaaagcatgagaatcgcttgaacccaggaggcagaggctgcagtgagctcagattgcacccatgttatcatgtacatgaattctcattctttaaaagtttcaaacgtaacacacattaaaaaatataaaataaacagtctgtatttctgataaacagtgttgatgaaagcacttaaaacccattaagacggcggattcagaaagccctagagaatattgagttcatctatatgagaaagtgatatgcctttgaaactatgtcaaaaataaataatttgaggtcaatcttggaattctcatttacctcttaaatatagagaaattatttcttcttcctccttattattccagtcccccactccccacaaaaggcaggttattttcacctcagaaaaaattgtatttagtaatttaaaagttcacaacatatgaagtgtggcaaaggcctactttccaaattcatttgtggatctgggagcatgaaataaaataaccaggagacagtctagatatcatggggtgaaaagagaaaaaaaaaaaaaaaaaaaaaaaaataaccaggagagagctgaacctaaaacaggaaagggaccatgatacctcagcaatcccaaggtttcaggctacaaggaagtggttaatttagatctacttagaagaaaattatgttttaaatttatcctaggctatccaaataaaatgaaatttacttatatgtaacttacttcccttttatacttaccacataaaaatattttacactctttaaaatagcccaatgtgtgggctatatttctgacaactagatcccagagatacagcatgagagctgagaagggaaaagctctgattttaggggttgagcccttttctttttcttttcttttttttttttttttttgagacgaagtttcgctcttgttgccccaggctgtagtgcaatggcgcaatcttggctcaccgcaacctctgcctcccaggttcaagtgattctcctgcctcagcctcccgagtagctgggattacaggcatgcgccaccatgcccagctaattttgtatttttagtagagacgaggtttctccatgttggtcaggctggtctcgaactcctgacctcaggtgatccgcctgcctcagcctcccaaagtgctgggtttagagatgtgagccactgcgcccggccgggaaaccatttttgaaagaggtctttcttcttggtatcccaggcagtggtgacataaagcttctaagattagcagaaaagcacttagatgggaaatcggacaaagtatttggccaggggcacaatattcttgcattatacctcactaactgcctccaactaaagacagaatgaggctaagcacagtggctcatgtgtgtaatcacagccctttgggaggccaagacaggtggatcacttgaggtcagaagtttgagaccagcctggccaacatggtgaaaactcatctctactaaaaatacaaaaattagctgggtgtagtggcatatgcctgtagtcccagctacctgggcggctgaggcacgagaatcacttgaatccagaagggggaagaggttgcagtgagccaagatcataccactgcgctccagcctggacaacagagcaagaccttgtctcaaaaaaaaaaaaaaaatcattgacctgttaaaaattaaaatatactacttttggtcaacagtacactcataagataatacgatcatgtgccacatctgcataatgacattttggtcaataatagacagcatacagcatatatagtggtggtcccataagattaaaatgaagctgaaaaattcttgttgcccagtgatgttgcaactgtcataatatcccagtgcaatgccctagtgtgttaacaaaactattgcactgccaggtgtataaaagtatagtacatgcaattctatacagtacataatacttgataatgataaacaattatgtcactggtttatgtatttactaaaattttcattgttattttaaagtatactcctccttctacttaaaaataataataaagttaactataaaacagcctcaggtaggtccttcaggaagtactctagaagaaggcactgtcatcataggaggtgatagctccatgtgtgtcattgctcctgaaaactttccagtgggacaagatgtggaggtggaagatactgacattgatgatcctgaccctgtgtaggccaaggctaataatatgtgtgtgtcttggtttttaacaaaaaagtttaaaaagcaaaaaaaaaaaaaattttttttaaatagataaaagcttatagaataaggatataaagaaaatattttcatagagctatacaatgtgtttgtgttttaagctaaacattattacaaaaaaatcaaaaaggtaaaaaaatttaaagtttataaagtaaataagttacagtaagctaaggttaatttattattgaagaaaaaaattaaataaatgtagtatagtttaagtggacagcattttataaagtctacagtaatgtccagtaatgctctaggccttcatattcactcactgctcactcactgactcaccaagagcatttgcagtcctgcaaactccatccatggtaagtgccctatagaggtataccattttaaatttttcatattgtatttttactgtatcttttctatgtttaggtacacaaaatagttaccactgtgttacaactgcctacaatattcagtacatgctgcacaggttgcagcctaagagcaacaggccataccatatagttcaggtgtgtagtaagctatactgtctaggtttgggtaaattcactctatgatgttcctacaacaaaatcacctaagtacacatttctcagaatgtatctctgttgttaagcgacacatgactatgtatgcaaacaagggaaaattcttaagaggtcctaattgaaaagcatttattatgaatcattcaacataaagttccaggggagttgcatgctgtcatttcacattcaatctgtggcttcttgacactgcaaattcctattttatattagactttacaggtcacttgccaggttgtgctgttttggctaatactcttgactgcaaatgaccactagcctatcaaatcctattgtctgacatcattaagatatctttttcaatggcatgagtggtggcaaacatggagacttacgcagtcatcaagtctctttctaacatatttattttatagccccattttcccctttagagcctttagggaactgccacatcataggtgtacatgtcactagagaatgttcacaaaaagctagtacaagatttggaagtgcatataaaagaatggcatgtctgtgcatatttaaattgtgctttgaaaaaaaatagatgtaacacaaatggccaaaaagcatataaaatgatgatcaacaccactaatcactggagaaatgcaaatcaaaaccacaatgagatatcatcacctggcccccatcaggatgaccactatcaagaaaaagaggatgtgaatacattagacacttgtgcattgttggtaggattgtaaaatgatgcaaccactctggaaaacagtatgaaagttcctaaaaacattaaaaatagaactaccatatcatccagcaatctcacttctgggtatgtattcacaaaagcattattcgtaacagccataaggtgaaaccaacccaaatgtccattaacaaataaataaacaaaatatggtgtacacatacaatcaaataaatattactcagccttaaaaaggaagggaattctgtcacatgctataacatgaatgaaccttgaggacattatgctaaatgaaataagccagtctcaaaaagacaaacactacataattctatttatgtgcggtatttaatatgtgacatcaaattcatagaaacataaagtaaaatggtagtttccggggctacagtagttggaaaggaagttattatttaatgagtgcagagttttagatttgcaagatgaaaaagctctggtgctgttttacaataatatgaatatacataacactattgaactgtatacttacactattgaactatatacttaaaaatggttaaaatggtcatttttttcctccctgtggagaccacatcagaggtcataagatggtaatttttatgtgtttttaccacacacacaaaataaacgtcattactttcagtttcacttgagatactgcagtaaaagcaatctggtctttgtgccattttcttatgggttttaaatatcaggctaaaagtctataagctcttcaaaatattttcagttgttccatttaccaaatgcaccatgtgcttagtgctatacagaatatatatgtcatggattatctggcattgcagcataactattttctaacagactataaactatgtttacaactagagaaaatgaattatcccattcagttcaacttacagacactacatgccaatgtagtgttttcctgagtagcctaacttctgaaataagtcatataaaggcaagcaactctgctacctaagtttgtctcttagatttgagggttttaagccaaatgaaaataaagacaaaactacaaacaagtaactagccccacataggatccctcactattaacacaaatatacttttatacctacatttctttctccccaagtaaaagtaagtctctaaagcattggttcttaaaactcttttgatttacagctatgtggcataaaagagttacaaaatggtgtgtacatacattcttctggagagtttcaaataatttgactcctaagagtctgtgacccaaaggaaacactaaaaaccttaactctagatactcacatttaggtaaaatccatctaagtgtaaacagaatggtagcttcaagagaattcaaattattaaaggaaaggtatgaatgtcctaactctgagtatatttcaaaggaagaggatactgtttcactgttgatgctagagggcttccatggacccaggtcaacccctgacctagcacgtaggagaaagtcacagatatcctgttatccccagtgcccagcatatcaagcctgacatgtagcaggctttttttttttttttttttgagatggagtctcgctgtgttgcccaggctggaaggcagtggcaccatcttagctcactgcaacctccacctcccgggttcaagcaattctcctgcctcagactcctaagtacctgggattacaggtgtctgccaccatgcctggctgatttttgtatttttagtagagacaagatttcaccatactggccatgctggtcttgaactcctactcctgaccaagtgatccgcctgcctgggcagagtgctgggatttcaggcatgagccaccacacctggcctgtagtaggctcttaacagatgtttgatgaataaagctggatggtgccctgactggagatgaagaactctattaaactaaggaagcagtccactgtaagatgacacactaggccacattcaggacaaatacaagttacatacattatgccctgaagaaggtatttctggaaagtataccattacatagagctggataaatgcaaacaggctgaatttcacagaatttacttatattttctttcctttatttaaaaatgcttactttggggaaggaataaattacagattgcagtaaagccctgacaaccactacagtggaaataattttcttttatatttcagtgaattacaacaatagtcttccaagctgagcatctgatgtcttgagaatagcagttgaggaagtaatcaatagttaatcactttagtatactttttgcaaaatgttaagaagcaccattctcacctcctgttctacagccttctgaggttcaggactattgctgacctaggaagagggaagattataaaagagaaaaaaattatgtgtttactaggttttaacacagctgtaactttggcttgtactatctcccaagatacaagattcatctattatctactgtgtttaaaatgagggtttggaagctttgttttattttgacttaagctgaccttaacactctagtttaagtaatatcatggttcagaagccaccacttggatcagtgtcttatacttatcaacatgcagctcattgtttaaccttttttttctacttacaccactttatgaaatcttcctgatgtttattccagtccctttgactatttaacatgctaataatccagtgcagcatactcagaaatgtttatcacacctccttctatcatttctgaattagttagataacactaatgatcaaaggatcaccaaaatccaaatcctttttcttattttttttgagacacggtctcactcctgtcgtccaggctggagtgcagtgacacgatcacggcttgctgcagcctcaacttcgcaggattcaggtgattctcccacctcagcctcccaagtagctgggactacaagtgtaccccaccatgcctggataaatttttgtatttttagtagagatttggtatcgccttgttgcccaggctggtcttgaactcctgggctcaagtgatccatcttccttggcctcccaaagtgctgggattacaggcatgagccatgtgcccagtcccaaatcctttttcataaaaatctatttattcatattctttatttctatctatacattttccctctatgagacggatgtgtttctcttaaatacaaagcaacagtttcaaatactcttggtctggaaattcatcaaagtctttttgaaaggctgctagctctcagttatgcccttaaaaatacacagattaggccggccgcagtggcacacacctgtaatcccagcactttgggaggctaaggcaggtggatcacctgaggtcgggagtccaaggccagcctgaccaacatggagaaacttgtctctactaaaaatacaaaactagctgggcgttgtggcgggctcctgtaatcccagctgctctggaggctgaggcaggagaatcgcttgaacccaggaggaggaggttgcagtgagccgagatcacgccattgcactacatcctgggcaacaagagcgaaactccatctcaaaaaaaaataaaaaatacaaaatacacagattaacaaggcatgattcactttgtaggaatcagactgcctcttctttaacagatgtggtttttttttttcccctagctttattgagatataactgacaaatacagcatatagttaaggtgatttttttaatacacattgtgaaacaatcaccacagtcaagccaataaacatatctagcacgtcatactttttttggtggtaagagcacttaatgtttatttataagatctttgattctagattctcatcatctttaatcattctcttcatcaaaaactaggtaaaaacttgggtagctctctctatataaaagtagaaagattgtcaagctatgtcattaaatgaaaaaaaaaaaaaaaagcaagcagcaggaaaacacttataaacccacttatcttaaaaagatattatatctatgtgcacctgtaaagaaaaaggccaaggatacatcaactatttacaatgactgggggaaaaaatgaaatttagggttgaagaaacttcccattcctactccacattcttcagtattactaaaaattgtgaaactgaattaatataattttttagacacaggatcttgcgatattgcccaggctgaagtgccgtggctattcacaggtaccattacagtgaactgcaacctggaattcgtggcttcaagcagtcttctcacctcagcctcctgagtagtaaaataactttttaaaagaaattataaaggcctcttttagaaaatatttggacctctgagcaccttaacaacatttctagtacatggcattgtgcctaacacagtgagcatcaataaatttttttgagtgaaaaaggtaattttttcagtagaaaatgttaaacaacttctcctattctaaaagtctgtttaaacagtaaatgtaagtattaataaatacctatgtgccaattacctcagatgaagtcacatttaaaatacaagctttaaacaccgccattttgaaagtgctgcttatttacatctttatcagtttctattctcaacatacataataggcatcttggtcaacatacaacacaatagaatctttaccctttttttccttccaaaccctaacagtcacctataggtggttcctaaagttatcacatgaagatatatgtgaggaaaaaagcttataagcaaaaattgagtttatagaacaaattccttatccactgtcataaacaaaacaatatgaaatattacaacacataatccatttttttcttaaaactctacttttattttaccctagtaggcacactaatacaaaattctataaaggaggtataaactaatggaaaaacccaaaccagaagtaaatgaatgaataatgcctagatcttggttcctaaatacacttctcccaaaaaatgtgccagagctcctttgagaagtagtccaatttttaagagtggggcagggaaaatacaacagcttagagcatcttatggtgccaataaggaagaaagcattcaaaaaaggatggggtatgtcaaaagagcacaggagccaacctgaaagagctctcaatgtccaaagctagaaaaatttgagaaaccaaagaaatgataggttcgcatagcccacagaataatatatgtatatatcccttgaattcaaactggactggagggaaggagggaagaagacaactctccctgatagaagaattccaattaataaatgtagaatgaagaaaatagaaaataactattagcaatattttactaataattgttgtaggcaaaatccactgtggatgctaaaatcagtgaatgaaagtttgagcagaaacagggtatctgcacagtctcaaagtatatccacaccaagatactagattctgttatattctcgccaaaaatacataacctcaatctaataatgagaaatcagagaagcccaaagggagagacattctacaaaacaactaaccagtactcttcaaaagtctcaaggtcatgaaagacaagacaagactgaggaactgttacacactgggaacactggcgagacataatgtacaaaggcaatgtggaagccaggtgtgctggttcatgcctataatccctgcactttggcagactgagacaggaggattacctgaggccaggagtttgagaccaacctgggcaacatagtgaggccctgtctgtaataaaaattttttttaaaaaagcaatatgggatcctgggctggattctggaagggaaaaaggatattagtggaaaaactggtaaaactcgaatacaggtttacctaacagtattgtaccaaagttaatttcatagctttgatgattgtattatggttagttaacatcaggggatgctgcgtgaagggtatatggaactctgcactatttttgcaacttttctgtaagtctaaaattacttcaaaaaagttatttaaaactgcgaactttaactttttaaattacatatgcattttataataggaattgcaaataacaatagatatgattcaactactatagagattaaagcttgtagaaactaaagaaataggaacaatttcagaacttaaccacaaatggaggaggatggaaaattctctcaacaagaatgctggctctgtttagacatttcctgttctgcatgctaagcacatcccctgaagaatgcagcacacattgactggctttacataccaaactctgctaacaagagcttctcacagcagtttactaaagtatcacaagtcatgtgattttatgagaactctctaaaattttcacaagtaggtgtctatccaattggtttagttagttaaaattgcttttctcagatctaaaggtcacattctactaataatcaacaaccaaggatgctcttcaaagaaaaaaatacttttttggagtacatatgtatacacatgcatacatgtgtgtgcatgttctatgccagccatataattttcatgatgctttctaggccttggatggttatttaccacagtattatttgtaacagcaaaagactaggaaaaatgaagctgtctcagcaacgaaggagatctgaattgcagctgggatatgtgatcccttcccctctgcccttcttctaagattctgatacatcaattatctttcttcactcccttgtcttcaatttttctctctattgaacccttcttgtaagcatagcaacaacccagtctctcccattctatacttttccctctgctctgccaatctccacctcaagttatcctttttctctcctcccaccacaatcaccattttgagtagtctacacatgttatttcctctttttatgatttacagttactcctgttactggccctacaacttaaactgctcaaatctacacctataaatttacaaattcagtcctcattctacttgacttccccacaccagctgaccctgctgacatcttcttccattctaaaactccctttgtgcctcgactttcagcgctcaagtctcttacggtctctcttctctgccactacagccctccactaatgcccttcttttcccatgcatcttctttcttctccactccagccccctctccccctaccacacacagatgctgccttcctcatctgctcaggctctgacactctatacctgggacctctccttggggaggctctcatcatcctgtttagggtcttgtacccccaagcctggctgccatcctgcagggatgtccttaatgttgctggggccctgactctctacaccaggctaccccatatggattacccttgtaactttgcttaggttatgataacaaccccacccctgctcctaagcaccatggaaagccttaccttcctctgccctgcctggtggctttagaactaaattgtgcagaaaggaaagagaaagggaagatgaagcaatactataccaccttaataattacgctttatagtaaatcttaatacctggtagagcaagttcttatacttactgttcttcaggactgtcttggttatacttggccttttgttttccaattccttcatttgtagcttctttgtgaatataattcagtaagattaactgtctcaccttaacattttgtccattctcagtcttagcccatgactattactattattattcattatttttcttgagacaaggactttgtcacccaggctgcagtgcagtggcatgatcatggctcactatagcctcagcctcccaggctcaagttgatcctcctgcctgtgcctcctgagtagcagtgactagaggcgcacaccaccatgcccagctgatttttaaatattttgtagagacagagtcgcttgacactagaggaataaattttaaaaatacataaaaaataggccgggcgcggtggctcaagcctgtagtcccaggactttgggaggctgaggcaggtggatcacttgaggtcaagagcctggccaacatggcaaaacctcgtctctactaaaaacacaaaaattagccaggcacggtggtggacgtctgtaatcccagctacttggaaggctgaggcaggagaatcacttgaacctgggaggtggaggttgcagtgagccgagattgcaccattgcactccagcctgggggacaaagctagactccatctcaaataaaaaaaaaaaattatatatataaataaaataagtaaatatatgtgttttatatatatatatatatatagtgtgtgtgtgtgtgtgtgtgtgtgtgtgtgtgtgtataaacatttttttaaaaaaaggaaaaagagacggagtcccactacgttgcccaggctggttttgaactcctggactcaagtgatcctcctgccttggcctcccaaagtactcagactacaagcacgagccacctgtccagcctatagcacttttataatatgctctttaacgcaacagctttgataatttaatataaggagtttctttttatcaatttcactagaagtcccccggtacgaaattcctgttaatgaagcaatacaaaactcctctgctttcttcttgaactgatctccaaactcgatttgaggacaatcaacagggtgttagtctctagggcgttagtgagactacatgtaaactgtggtatttgcactggccttgaattagggtatttttactagtggtaatctaggcaaggtaaagcatatgtatgtgaggaaactataaagaaaagcaattagatgcagaggtctagagtccagggaagagatatgagttgtagattcaaatttgtgagcactgatgcatagatggcatttacagacatggaatttgatctacccagattaagtaaaaagaagggctgacgagtaccccaacatttagaggtccaaaagcagaagagaaaccagcaatggagaaggaatggtgaagaaaatcagtgtgtgtttgccatggggaatcctggaagaaaactgaaggaagtatttcaagaagctgaatatattgaaatatataaatgctactaaaaggtaagatgaggactgagaattttccattatatttggaacgatggattcttttggcacccttgacagaaggcatgttggtgcagtaggtaggactgaaagtctgagtgtgatgaagagaaaaccaccacttaaacatgctgaagtgcttccccacttcagggccttcacaattgccatctcatcttcctcaacacgtactcctccagacctttccatgcacctgcacatccccatgtcaggatgaaagtcatcttccagaggctttctctcataccctaaaatgagtacccatccttactaattactctttagcttaccttgctttaacaatacttgaagttctattatttcatttatttgtttacttgtttgtcgatctccatgagattgtgataaatcaagaatatgtacaaatatttctttttaagaacttgtacatttttctaggtgcatcattcctagaaaatctattagattatttacaacctcactcaccacaggtctctcacagtgagaaatttgtaatacaccaacaaagaaggcccataactttacaatcactggcaaatccccttatctgctgctattctgccacaaagttttctgtcgttctctcacaggaaattttcaccttaaccttacttcacagaaaaattgtggtagtaacactaacattaattataaatttacaccttccattttttcataatgaagtcaaaacatgccctaagatggctaggtcatcctcaatctcaggggaaatgatattttaaattagagtctagtccaattcctgttatacacagaaaccaaaatgacagggcatgtgacatacctgtggcatagcccacaagtgaatcctaaacccctgacttccagccctggtaaagtagaaagttatctagtgaacgacaagggcttaggtgaaaaataaaatactgtacatcccaactagtaacatgatttacaaactagacttttgccattttgtaagcaccaccccattcctggaaatccttattcattgagtctttatctcattcggtggctccagttccagaccaagtagagagagacagggttttgttttagaaactctctggtgagtacctgccttatactaaggcaagtcctcctctagggaggacacgagaaactcctctgcttaagtctatactaataatttgttaatcggtttataagttgtcaataaagttctggcatagcctatcagtggagtaaaaaataaagagaattataataatctcttaaggcgcacttttgggtagtattaaaatatagttaccatatgggatacttttttttgtactaaaagtatccctcctacttttgttttgggaaagcacacacagcaagtaggcaattgagagatgagtgttttggaaaatctattaaacctgcaggaaggctaaaagacccattgtggtacagaagtaaagaaagagagagttgcagccaggcgcagtggctcacgcctgtaattccagcactttgggaggctgaggcgggtggatcacctgaggtcaggagttcgaggtcagcctgaccaacatggtgaaactctgtctctattaaaaatacaaaaattagccaggtgtggtggtgggtgctgtaatcccagctacttgggaagctgagacaggagaattgcttgaacccaggaggaggatgcagtgagccaaggttgaaatgagctgagatctcaccactgcactccagcctgagcgacacagcaagactctgtctcaaaaaaaaaaaaaaaaaagtgagagcgagcgagttgcccagtaacatcactgtgggctaatactgagcactattagcttctaacaaattggggcaagaagggagaaaaggtaaggtaacccctattgttaaaaatgattttcagtgggagaaaagctatcaaatatttatcaactgcttactgttttgagcacatttcaaaggtcaatagaatgattctgaatgcctctacattctagagttgagagaaagaccacttatattgtccccaaagattccttctaacatctaaaacaaatcattcactcaacaaacatgttctgagtacctataatgtgctaggcacttttccaagtgctgggggatacagcagtaaataaacctcatagaatttatgttcttagggaagagtctagaggcaactaaatacagtaaatgacagtattttagaagcattgttaagagctatctttacatgcttagaccatgataagtattatggagaaaaataaagcaggaaaaggaaataagatacatgtaactcatttctactcattgcaggtggcctgtttcatgatgagttgattttataaggtaacaaaagatcttttataatcaatatgatgaatatttcattttaaaagatacagaacttcaaatattcttaaaagttaattattagcttatatccactcagcatatattattgtttatatttatcacttatttgatgacaagttcttggtcaagaacatatctataattaatttacaccacgcctttttagctaaacataatgcatttttgtagactgctctatgaagcggttttaaagaaggaacagtgtgtttgttttgttttgtttttctgtaagtgaaaccctactaaattggaaagcctctaacatgaaccaagactttctggtaatagcgattttcaattctaatataattaggttcactagttaccctactctaaactcatatagcctaaatcaaatagaaattaatttttgtcattagtatactaatcaagatgatataatgcttcactttttttcctatataatttgaaataaaatagtaaaaaacacactctttggtaagagctcatttccaatttaaaaaaccaattttacaaactaaatgtatacaaacaattacattttactatactgtggtcgtctagcacttcaattaggataagaaagtttatgaaatataaactgacacaatttcagcagcataaagcttaccttcaggctggtatgagaacgtggttgacttaattcctgaaatttccattgctcagatccaggggtctctcctcctttctgagcatcaggtgtaagcaatccatctccagcaggtaatgggaaaattcctaatgatatagggcgttcttttctatttgaagaggggagaaaaaattcggcattcatttattttgactttttatttgccatgactataagtaataagcctggactgccactgttttacaaccatcactcaaaaatgacactgtctgcccatctgaataaaacagacttaccaaagaggaaggacagtctcagtttagttagcctcaggaaattagcctcaagaaatcaactaagaaaagtggtaagaagggttaaggaaatcttaaaagttactgacgagttccttgcccaagaagcagtcagtggtctagtgtggtctggagaagagctgctgctgggtttttaaccatacgtagcttagccctagggaacttgcaacctccttctttggaagtgaatccaacccatttcttcccaaatcctctcgctaatccctggatgtttactgaagcttcttcagggtatgactttcctgcctagaggaaaatcaatatattatctaaatcagggctacctattaaatgatgaaaagaactcaaaatatctttctccccaccacccaagtaagaaagctctgtttttctacagaaccactatatgagttcctttcaagcacagtacatatgagaaaaccattgtcggttttttccaaataagaaggtcaaataattctataaaagattactgaatttccaatgctttgtgagaagtttcaatgaacaagagttacaattttaatactaacagaatttcaacgagaaacacatcctttgttgatgcacacaagattccaaatcgaagagcttttagagggtggaaacaagcctactaacgggtcatcctgggtcattaactcaaaagtgtagaaactagaaagaaatgatacactaaaggtttggtgcctcctggaattcctacctctactggtaagaatgtaagttagaataaaaacaatgagctcattaattaaagtgggaaaatttcagttttgctaagtaagtctttaattctgtagttcatttttattccaagaaacttcagccacttttgaaatgtgtcttcacttaatacaaagggtgtgttcttccattcctaacaatctaaaaggactagtaaaactatcccaatgccttcttaaaaatgaggtgaagcaaaggggttgagagactacatttagtcaaagttgtatgcacaaggaaataaaatttaaaaacagaactttgatttagggggaaaattcaaaagcaggaaggcagtacaataagagggtagtttttgtttgtttgtgtcttgctgtgttgcccagactgaagtacagtgggacgatctcggctcactgcaagctctgcctcccaggttcaagcaattctcctgcctcagcctcccaagtagctgggattacaggcattaccaccacgtctggctaatttttgtatttgtagtagagacaaggtttcaccatgttggccaggctggtcttgaactcctgacctcacatgatctgcctgcttcggcctcccaaagtgctaggattacaggtgtgagccaccacacctggccaagagggtaaattttaacaccaaatctaagtttgcgactatgagctgccgggacaaccaaatgacaaaaattaaagtgactagtcagctaccatgtttacaccagttattcccaaatgctgttcagcaacaaagtttttataataagtccatgaaaaaagaggcgttatttattatttccttagtgcatagataatatagtacctattgtacacatacacattcccatatactatagaaccctgttctttcttgaaaatgactgacccttattttaaattacatcttttcttcttctttgattttaaaatgccctttctttcattaaatgatggtgacagtgataagtagctagatttccttttcatattcattctggacaaaataaaaagttgtcaatctgatgttttccccccatattttgtgaaccgaaaatccaaggggactaagagctactagctgacttttatttattttctaacataccttaatgagttaagcaaaaggtgactgggaatttaatgactgaatataatggaaagctctctaactcaaaatgcaaagacaaccaggaagatgatatacagacttcataagactccctcacactaatagaaatcaaaatataagccattcattttcacacataacaaatattgaaaaagtttaaaactattgggggagggagtcttctatgaatccaaattttactttccaaaaagtaaacaaaatcagttgacaaaatctacaatcaacagtcaacaaaatctacaacccaaattgcaaatagaattcccacctttttaatttgcttgtatcaatcattcagaaactactctacagggaggggagatctcttcagagactgacagctatctgtcaagtgggtcaatgatgctctaggttacaatgttccaactctgaaaaaataattactacatactcctccccttactttacttacaaattacatacagttggggtaagggagagaaggacgcataattaggcaagttcatgagaatcctacttttgaaaagaaaccctgaaaggtaaacattagtccagtactatgttggcatgcattaaatgcttcaaactcacagaagaaggaaaaaaatgagatacacgtggaaaactatcaagtggcagatttatacctgcagaccaaaacatctgctattacttgtctagaaaacgaagctatcaacaactatcagaattcttttttcttaattgccctacttccatatatccatttttgagttggttattaaatgttagcttatgtatataaataattttacaactacatttttggaacagctttttggctatattcacatttgatacaactaattagtaaaatctgctttatatataaaggcagataaaagaaaaagtacatttgttgaacactcaccacgtggtgggtactgagctagatgacttatttacattatcgcatttaatccttatcaagaaacagggattatttttccaatttttcagagtaggaaaagtgatgctcagagattttaggcactagtaattggcagagtttcgattcaaagccagtactgttcaattccaagccctttgctttccttggaacttcctacttggaactaccaactttttgacaatttaatcttaatatcaaagactttgatatctttatttaatcagatcagtagcaatttttgtggtaaagaactttaaaattttaattataaggtattttagctgtagctaaaacaatttctgctaaaaatggacacatataagtaactgaaaattatttactcaagtaatttaccatatatcttacaactataattaaatacaaaataataaaatcacttgatttttaaaaccacccaacggggtaagtcccatcaggagagaaaactcaggcagagagattaagcaacttgccaaagctcctacggccacgtgcaatagagcatttgcacccaggcagttcaattccaaagccttgttgtacccacttgcaggcgccgcacagcagctcacggcactgccctctcaaatgaagcctaaacccaagacatccccttaacattagtcttatattaatattctacatattcttaagttcagttgcttttaatttcttcaaagcctaaatatacagatacacgtacacaaatattttatgtactaatatatatacaagtagtaagattattcccaatttttataaatcaggaaagaaaataaaagaccaagtatctagttttaagtcattgatgaaatttaatttctgggctttcaactaatattaaacttgaactgacctatgaataaaaagaaacacattaagggaagttactactttaattcttcttaatttatctaaatctacaattagggtttaaatattttataaacatttaaataataaataaaaactatatactatgaactttcatttaaaaccatgcacaaagcagaaatctgaacaaatcagagactgctagtctgacggtttagaaaacaaaagaaaccacaaccttaagcctctaaaatacagaagatggctcttacagggtgtaagtagagtgagcaacagtaaagctacagagattaatgactacccccacaagcaggcatggatatttgtcacccaagactacaaagaaaagaaagggcaacatctgacaaaacaatagtgaataggctttgtaaagctttcacaactttgatgtgtaaataatggggaaaaaggcattccttaacctaaaagtcttaaattttttcactttaaaacatattttgttttaggaggaaaatatttaaattgtcagttcccatgagctattatcaaaaattacaaaaatgatacctgaaactctatcattcaaaggataattaaaacaaaataagcttacggcctgtatctaactgactgcaagtccaagcataaaagatatttgtccctaaatgctcagaagctaaatgcagaggttgtataaacttggagccggtgctctactcttgctcttcttttactttgaacattctgcttaaaacaagaccacactgaccttgtacttgtgtgtaagtacaatatgaaaatccttttctttagttagtggtttccaaacataaagctataatcctaactgatggtctataaattactataaattagaatcaaaaatcctagcttcaggccattttccattgtttcaatctgcaacagaaattgttacaaagcagacccgttgagctaaaaatttaataaaaaccagctaagcaggggcttctaagagagatgggagtacctgagtatccttggtaggttctgcgtcagagctggcacaccggtagaaatagaaaagtgcacaagcagcaaaacagagagagatactaagatagcagaattaatgaccaccgccccgccaacaaagccaaacacaaacagcagcatgcatccaggactcatggcgctgtgctggcatggtgaaacacccgaaccaaggaggcctacacgggggccaaaggggtatctttgtagtgaggatctgtcattcagcttgctgccacaaaaacaatgccatcagcagcagctttccactccatcctgcagcagctcccaagcgatgacgtcattccgttctccccacctcataaccatagagctgctgctcctagcatttatgcagcaaccccaagcgacagccagcctattaactattttcccctccactaagagtcctggcttagctcattggctacaatgcctgaagatctacataatttattcacactcctacaccaaacagatggctagctaaccctttcaaacatgcctctctgtaacaaaaaggacttcaaaccaattacacgggagaaataaaatatttcagcattcccataaattacaaaattttaaacctagtataatctccatcaagtatcagaaaacaatctaaatactcaatgtgctgcttatatggatggctcataatttatctttttaatggtaaaaaccgtttctacttttctgtgctattctctcctgcagcattccaaccacagtggagagctttttgaatcagcctaactattgttccaggattaaagaacagagaaaaacagaaacaaacatattatttattttactttttctcaaggcaaaatatataacaaagcttacctaattctactatgagctgtggattctagttgatcactccctgagagctgatgaagttttgttctttctaaatgttccatataattatggatcatctattttaaagaaagaaaaaatacacaatatttaaggctaatacctggaataaaatcatagtgttataacaaggaaaacattttggtacaattttcttatctatcagactactcgattccaagtaagagaatattaaggaatgaaaaaaattttaagggaaagtaatatgcaaatgcttacatttaaggatgctggtgtccacaaaagtagctaatatcttgcttaggatggcaaaaaaaaaaaaaaaacccactttttttacaatatgtgatgctattaaaataatattgatataaagaacacaaattagtaaacagacactgggaaagaagtcataaaagaccattggttaaaaataatagatggcatttgagaaagccattcactaaaatgagacacaacaaagaaattaatgtgaaacttctgaagaaaccatatccttatgtgctgatctcttccattttaaaaggaattaacagaataaagatcactttcaatttaattaatttaataccaagaaaagtttcttctttcggtatatttagttgaaagaatgttaaaatactttctcctttgactgttactggtatcattacttggtataatcatctattataacagcagcaaattaatacaaatgtaaaaaattagaatactttttgagtcttagataaggaatcatatgacagacaagctgaataagaaagtaaaaacttcaagaatataaagtacataaactgccaagaacttctaatgtcctatttgattcttgataatatatagtttcacttttaaaaagcctaaatttggaattaagacataaaatcaaaaggcctttgctagagatactaacatgatatgaataagaaaaaaatgaattttaaaaaacaagaaatagtgtgttagtatttaaagggtgtaaatattaagaggcaagcaaaggttgatgtctttcttgggaatattacttgaattctttttttttttaatgtcccttctcaccattcctaaggaatattacttgaattcttaacgctgtacatagaatagctttggaagtcactaaactttagctgtattaagatgcatttcaatctctttataacttaaaatatgcactgtagcatattaagtaacaaaataaaatttttaaaaagtttaaattcactttacaaagcttgcttttgttgtagaaattttatttggcatgtacaaatattaggaaatgtaagttaattttaagatgttatttatcatcaaataaacaaaaagctgaactctgatgcatgaaataaaacaaattaaccagactgttcctcaatgaagactagtccaaacaacaaatgttatccacaaagaatgaaaacagaatcacatgaatatagtatcttaaaattttttaattgacatactttttattttaaatttatagattttaccaccatttacacaacagttttggagaaatacacctttcatctatcagcaagtcagaaataatgagcttccttgtgtcaggaagaattttcaggaacaaaaatcaaactgaaactaatataacaaagtgactgtcaggcttaatcaatctcaatttaaattttcaaaaggttttagaaggcctaaattaaggctttgcagtggctcacgcctgtaatcccagcactttgggaggtaggaggtttgcttgaggccaggaatttgagatcagcctgggcaacacagcaagacaccagctctagaaaaaaaaatacaacaactagcaggcactcgcctatagtccctactgctcaggaggcagaagtgggagaactgcttggacccagaagttcaaggctgctgtgagctatgatcatgccactgcactccagcctgggcaacagaatgagacccctcaaaaaaaaaaaccactttaaaaataaaagaggtcaggtgcagtagctaatgcctgtaatcccagcactttgggaggctgaggtgggaggactgcttgagcccaggagtttgagaccaacctgagcaacacagggagaccctgtctctacaaaaaaatttttaaaaattagctgggtattttgggatgcgcctgtagtaccagctacttgggaggctgaggtgggaagatcgtttgagccagggagatcaaaactgcagtgaaccatgagtctcactctgtcgcccaggctggagtacagtggcgcgatctcggcttattgcaatctctgcctcccacattcaagcgattctgcctcccaagtagctgggtactacaggtgcccgccaccacacccagctaatttctgtatttttagtagagacggggtttcaccatgttggccaggctggtctcaaactcctgacctcaagtgatccacccgccttggcctcccaaagtgttgggattacaggtgtgagccacggcgcccagccgtgaattcttatatacactggatagtaaagtaattgtatgtatgggattgatttgttcaaatggaggacctaagtttccttaagcattcagatgaagaaaacaaactcaccccagattgctgtatagtaatctatgaactcaatatagaaaaagaatgacaagcaaaatgcaaaaatagttctcccccaatagccattctacagactgattctctattatcttattctaaactttcttttaatgactagtccaatgtaattacagatatagtattctgacattccaaaattatctatataatgaaatcaattctaactcaaccaaactagcactttaaaggaaagaactgacaaccaaaaatgactgagggggaaaagaaaagagagaacaataacaacaaaatggcagctattatttattgagcaccaattataagtcagtcagtgcagttacagccattttttctccatttaatcctcaccatatcatgatttcataggtaaactccaagttgattgtctggtcaatgactaacttttcaagttgtcactagctttggggccagaactctggcctgcctgactcagtcatctgagttattaagaattacaggactcaggccgcctttgtacttaattctctgagcaggcaatgagcccattgtcctttcttcctcatacccacaagaaaatcccataccctaaagcatttcctgatgtctggaataaaatgatatgcactatagtctataaacacacaaaaaagaacaaaaattatacataacaatttaaatattaataaggcctcacagtatcactcaggttaaaaaaaaaaaaagtgagtgggagggagcaccagtgttgttagacagaaaagagaagtgagaaagtaaaataggacacgcttcagataatctattcttgggtccaccaggtccattgcttctggtctcagaactgcaattctcaattttctcaggtatgcatattaattcacacattcaggagtcaattcagcaataaacaactgaagagagagagaaaaagagaggaaggaagaaaggaaagaacgaagggagggaggaaagggaaggaaggaaagaaagaaaagaaaggaagaaagagaatttaaaaataaaaaaaaaacaaaaagaaaaagaaagaagggagggagggagggaaaagaaaaatgtctagtggaactaaaggtgtagtgtgtttttttgttttgtgacggaggcttgctctgtcacccaggctggagtgcagtggcacaatctcagctcactgcaacctccacctcctggttcaagcgattctcctgactcagcctcccaggtagctgggattacaggtgcctgccaccatgcctggctaatttttgtatttttagtagaaatggagtttcaccatgttggccaggctggtcttaaactcctgacctcagataatccccccacctcggctcccaaagtgctgggataacaggcgtgagccactgcactcggccaaggtgttagtgttattaaaagttcagggagactgggtgctgtggctcacacatgtaatcccagcacttcggaaggccgggacgggcagatcacttgaggccaggagtttaagaccagcctggacaacatggtgaaacccagtctctactaaaaatacaaaaagtagccgagcgtggtggcatgtgcctatagtcccagctattcaggaggctgaggtgggagaatcacatgaaccctggaggcggaggttgcagtgggccgagatcacgccactgcactccagcctgggcaacacaacgagactccctcttaaaaaaaaatcaggcaatagaatctgacaaacctggcttcaaatctagtcactaactagcctagaatttggggcaaatcattttatagactctttctaaacctcaatctgtaaaatgggaatggatgagaatttggtcaaaggataaaatgagaatgcattcaaacactccctgatgtgagactctcccaagattccaaagggctaaagtttttggtgattagcatacacatgtgggcccgagtgcttcaaaattgtcctttatatttcttccactgccctctttaaggcatgtcttttaagcaaattcagtaatgtatacaaaaatttgatttaagaatagttgactatttaaatttaagaatagttattcttaaatcaaattttaaaaagccacggtaggtttcccttaagcaacaatgaatgtgtttcataaaagtgctaaacaactattaaaagacattatcttctttggaaataatagtgaaaaggttaaggttaaaccccttcaggcttcctttccctgaatgttttcagagtttatgttttaagggcgcctagttctttggctttagatagctatttataattgctaattgaatgacatctctagaacagatgtataaacagaaaaaattgtgggctagagcagaacagacccacatttcaaagcagccctatatatgttacataaaccttccttccttgaggcaaaacaaaatatagggagcctatcaggtcagaggatagaagctgctcataactgagggaggagatctatgaaaagagcttttgggcggcgtgggaaatctgccttggttactggacagacctagctctctgacttggtaattaaaatttttcctgagatctttttttcttcctagactatcttttcctcaaggaatagaaatagacaaaaaaaaaaaagtatatgttttcatttaaaattagtatgtcaggcttctttatagaagcgtatcttcacctttattaaatatatggaaaaaatatgaaatttcactttaccgttatttttaaagaatgtatatattttaggccaggcatggtagctcacgcctgtaatcccagctctttgggaggccaaggtgggtggatgacttgaggtcaggagttcgagatcaggctggccaacatggtgaaatcccatctctatgaaaaatgcaaaaattagccgagcgtggtggtgcactcctgtaatcccagctacttgggaggctgaggtgggagaattacttgaacctgggaggcagaggctgcagtgagccaagatcactccagcctggcgacagagcaagaccccatctcaaaaaacaaaaaaaagtatgtattttatattttatactttaatatagcataatttaataattttcaattattaaaaaagattagagcttcattttaaaaacaaaaacgttgtttattatttatcactatcaattacttcccccaaatatatttataatatatttataaaattataaattataaatttatcaattataatggatacagtggctcacacctataatcccagcactttgggaggccaaggtaggagatcacttgagcccaggagttccagaccagcctgggcaacatagtgagaccttatctctacaaaaaataaaaatgaaataaacattttaaaaattggcgtgcactggccaggagcggtggctcacgcctgtaatcccagcactttggtaggccaaggcagatggatcacgaggtcagaagtttgagaccagcctgaccaacacgggaaaaccccacctctactaaaaatacaaaaattagccaggcgtggtggcacactccagtaatcccagctactcaggaggctgaggcaggagaatcgcttgaacccaggaggcggaggttgcagtgagctgagatcaagccactgcactccagcctgggtgacagaacgagactccatcacacacaaaaaaaaaaattggcatgcacgtgtgtggtcccagctacttgggaagctgatgtgggaggactgcttgagcccgggaggttgaggctgcagtgcgctatgactgcgccactgcactccagcctgggaaacagagtgagaccctaattaaaaaaaaaaaaaaaaaagtatatatatatatatatatatatatatatatatatatatatataaaacatatatgtatttataattatcagctttaataagtactacttaagcaaacagtacatagagtacattgtttaggcactgagatgaatgatgtgaaaatcagtaacaggccttttagcaaccttaatatcttaatatccaccaaatgccattaaatcttaatatccactaaaattaaaccttaatggctaacaaatgtcattaaaatgtgagggctttttttttttttttttttttttggagacagggtctgttgcccaggctggagtgtagtggcacaatattggctcactgtatcccctacctcctgggctcaagtgatcctcccacttcagcctcctgaatagctgggactaaaggtgcaggccaccatgcctggctatttttgtatatattttttttggtagagtcggggtttcaccatgttgcccaggctggtctcaaactcctgggcttaagtgatccgctcaccttggcctcccaaagtgctaggattacaggcatgagccactgctcccagccaaaatgtgggtttttttggcttttttttttttgagacggagtctcgctctcttgcccaggctggagtgcagtggcgtgatctcggctcactgcaagctccgcctcctgggttcacaccattctcctgcctcagcctcccgagtagctgggactataggctccctccatgatgcctggctaatttttcgtatttttagtagagacggggtttcaccgtgttagccaggatggcctcaatctcctcacctcatgatccacccacctcggcctcccaaagtgctgggattacaggtgtgagccaccgcacctggccaaatgtgggtattttttaccactgaaaaagctgctgtataacctgctcctgtcttccctgagctctatggttcaagcccttcatggaccatcctttccatctgctactggatatcaattctgtgatacttcatgctttgggtatggttattaagctaagattgtaataatcaaatctcacgtgtcaaggctaacagggaaaaattctacaccctaccccaagaaagtgctaaccacattattcaaatgcaatgtgtggtggggttttctgttccttaaaagcaatggctagtattaaaacatttttttaaataaataaataaacagcaacgtccaggcacactggctcacacgtgtaatgccagcactttgggaggccgaggtgggtggattgcctgaggtgaggagctcaagaccagcctggccaacgtggagaaaccttgtctctactatattaaaaatacaaaagttagccgggtatggtggcacacacctgtaatcccagttacttgggaggctgagggaggagaatcgcttgaacccaggagatggaggttgcagtgagccgagattgcgccactgcactacagcttgggcaacagagcaagactctctctctcacacacacacacacacaagcaacaacagaatatagctacaatataataatgtaaatacaatctttgtagcattaatatgcttactgtatacagaatacaatctgtgtggatattctccaaaacatgattttaaattgttttatgattatagattataaaggtttttatactcttctaaagaaaaacaacaacatagtttctaccagacgcaggataagagatcacacaaactagggagaaaaaaaaacaaacaaaaaaacgggctaagactggaaccatatgtatcatgggaaatataggactagcaaggggaaagagagaggaattatttttttcatgtaacaaatattgtataaaactataaaaattatatttatctgggtatgtgaaacccagactgaccatgacatacaaaaataattttcacattaagataacagaaacaaaagcaacatgaaaggctgacagggaatcataaaaaggttaaaaaaccctcaagtacattttctaatttcctttgaggagactgtgctgaaactgttaatttaaaatactgaaaactcatgcaaaaaacctacttttgagttattttaacacattataatttgtgcttatattatttgttatgagcttaatgcaaataagtcctttacaatggataatagatgtagagaccctttaccaataacttaccaatccataatttccaaactcataaaaaaacaaatcagttctctcatctaagcatcacagaaacttcattatgtgcacataggtttttgcttagccagccaaggagagaagtactatagctgccttaaataactaaattattctgtagcatactaattcaccccatgaaaagctaattccaagaaaagttgacatttggtaactaggtaaatgccacatgaaatttaatgttttcttgaaagaatccccaagaattattcttttttaaaaaattctgattttcaaagaaaaattaagacatattttctaaggttcatttctttgtctcaataatagcatggtaatgaaaaacctagaaacccacctcagtgtgtctttgatgtaatgcattatattccttcttcagttctgcttctctttcttcaagtctgctaactgaaattaagatacatacacttgatcaaaacaaaataagaaatttacttgaaaaagtacatgttagactcagaatgggctatccataatccttagcaactttcagactcagtgttccatatgcaagtcttcacaaagcagtgacctcatttcattatccttaataatgaaaactttcagacgagcggaataccttagattggttctctaatattcctatatttatcaggtcatccccctaaacagttttttttttaacatgatacagaattaactctttcaaaaacacaaatcacctcatcaaagttttaaactgggattagggcccaaataatgtatttccaacactactcaagctctttagcactggcagtttgtgaaagttgattgtttataagtactttttctgcttcaggtctcctcaatttcagggactcatcttcttttatttagctccctctgctgatgggttttgtgagtggcactgacttgaggtagtgctcacagagtacaacttcaggatatttaaaaaaaaaaagttttattaatagatcctgagatacagaatgtcaggacaggattccacaggaaagaataactgatagcaaagaggaatgattcagggaggaggtggtgtccacacagaaccacaaaggaagaaattacagtactcaagacagatggtaatgagagcattcctgacactgttaccacagagaagggaacacaaaaccatgcctgtggtgaggcagagggtggtggtgaggcagaggggagactggccagactggaggagcccatacttggctaaggagcagtgggagacagtctggggagaaataaagctggtgctagaggagtttatcagggtactcatttagtctgttggaaagccttagcatagttgaaaatgttccctgggtttaagggtcagctggccgcaaacaggcaaggctgtgtgtaatctacaactggtgactgtggaggacagctgtagaaggaactagtatgaactaatattctgacagcagataaatgaatgttttatatgcctcctagtattaacacaccagacaccaaacaaaacataccttgtgctgcccagaaaattcattttgggtttgtgtacctttacttgccataatttgtttaaatatcttgaaaatatgtgattaggaaaactgtagctgtctttgttttgatttgtttctaattcaagcttatgtgtcgctggctcattacatttgcaccagagagcaaacacacactacagtacccacggagcacattttatcatgccacacaagtgttgaatacatctgctgctcatcttatcctgtggctgaaagcgataataagcaaatttattatgcagatgtgttgtgataaaataatagatgctaaaaccacaaattaatttttaataaaatttaattctatgatttttatttaaaaacaggaaatccaagcaaattatggatatttaataatttcaaaataaacattttctactacttgtcatttaaactgattaaaagcttaaaggaattctgagactactggacaaaccatatctattttcaattgttcatctttttgaatcattattttcttgataatgtgcaacaaaaacaaaaattggatgctgaggctgaaataaaatccaactatcattcataatcctcaatttcaaatttgtgctcaatagtagagccttattattcttgtcagctgatataaattcataaataaatttgtatcaccaacaccaccactactaatagcagccaacaacatcaagtgcttactatgtaccatacagtcctaagaactgcatataaactaacttatttgagcctaacattaaccttacgatgaaagtattattattacatccatggtagagatgaggaaactgaagcaaataggagctaagtaacttgcccaaagtcacacagatagaaaatggcaaagcaaggattcctatcagaatctggctccagaatctgtgttcttaattaccatgctatactgcttctcagcaaatactcattttaatctgttttgtatattggagtttactttaagatatcactttgggcagaggggagtatgcttcaaacaaaaaactcctctgttcttacagaaacaacccattcacagatactttgatacaaagggcatcaaactgccaagcaaaatgtgtacccaagtcagggagatgcacattaaaaccaaaatgcaacaccaccatgcttctgaatggctacagtgaaaaacacaacacaccaagtgccagtatggatgtggaactactggaactttcataaactgtggtgtatggtttcatacaccgtaacttggtatgcccaatttaagaactgtttggcaagatttagttaagtttcgaatgtttgccaaccctatcacaaaacaatgtcattgctagaaagcctatatatatgtccacccaaaggtatttaaaacaatgttcaaagaagcacaatctgaaaacaatccaactgtccatcaagagtagaatggataaatattcatgtactggaatactgtacaacgtgaataaacaaattattgccacacacaacatcatggaccaatagcacaaatatgatattgaaggaaagaagcagaaacaaaagaatacaaaattcaaagacataacacaaaactaatctgaaatgttacaagtcaggatagtagttacctctggggaggagtcagtgatctgatgtatttatgcctgtatagccccagcccacctcagttcaaacacgatgtgcatccattcacacaggcactttcctctgcttgaatactcattcttccttatgttatcctacaatggctatgagttcaacatgtagaatgggatttaaacaaactattcagaaccataacaaacaagctttattgctctgactgtagcattctcagggagagaacaaaaatgttaccgaatagactggataaagaaaatttggtgggtcacgcctgtaatcccagcactttgagagccgaggtgggcggatcacaaggtcagaagttcgagaacagcctggccaacatggtgaaaccccatctctactaaaaatacaaaaactagctgggcgtggtggtgcatgcctataattccagctacttgggaggctgaggcaggagaatcgcttgaacccaggaggcagaggttgcagtgaggcagaggttgcagtgagacaagattgcgccactgcaactccagcctggcgacagagtgtgactccatctcaaaaaacaaacaaacaaacaaacaaacaaaccaaaaaccagaatctcaccacttttaccaccttcatcactctcactttgacccaagacatcatctcttgcttaggttattacaataataatcctagtctcctgactagtttctctacttagtctttgttccctacattctcaaaatagagatggaatcaaacagtgactaaccgctcaaaacttcaaagcttccgatctcatttttaaaaggaaaaaaaaattcttacaatggtctgtaagacttttctggatctgattgtcaagtcacaacactctttgcttcccatccccacagagaactcttatctcctgacctattatggactgaattgtgctccctcaccccccaaattcataggttgaagctctacctcccaatatgactgcatttgggggatagggcctttaagaagataattaagggccgggcgaggtggctcacacctgtaatcccagcactttgggaggccgaggcaggtggattacctgggcaagagttcgagaccagcctggccaacatggtgaaaccctgtttctactaaaaatacaaaaattagccaggcgtcatggcaaatagcagtaatcccagctactcgggaggctgaggcaggaggatcgcttgaatctgggagatggaggttgccgtgagctgagactgtaccactgcactccagcctcggtgacagagcgggactttgtctttttaaaaaaaaaaaaaaaaaaaaaaggcagaagaaggtaggtaattaaggttgaatgaggtcattaaggtggggccctgatccaacagggctggtatccttataacagcaagagataggcaaaaggccatattaggacacagaggtaaagcagccacctgcaagccaaggagaaaggcctcaggagaaaccaaatctgcttgtaccatggatctcagatttccagcctccagactgtgagaaataaatttctgctattgaagccacccagtctgtaatattttgttatggcggccctagctgacttataccattaagcaaacctcagagaaaagggttttttttgttttttttttttttccttgagacagagtctcactctgtccccaggctggagtgcaatggtgcgatctcagctcactgcaacctccacctccctggttgaagcgattctcctgcctcagcctccctgagtagctgggactataggcgtgcaccaccacatccagctaatttttgtatttttagtagagatggggtttcaccatgttggtcaggatggtctcgatctcctgacctcgtgatccacccacctcggcctcccaaagtgctaggattacaggcgtaagccaccgcgccccaccgagagaagcttttatataagatgtttgtcaactgacttggtcagagagctgggtttataccttacagaacaaaacattataatgccacaaaacaaagtcaggtcctgactgattttatgccagtttcctaatcaatttgtttgcattgctttgtgtcaaatgtacaccacttaatagtgagattaggccaggagcggtggctcaaacttgtaatcccagcactgtgggaggccaaggcgggctgatcacctgaggtcagcagttcgagaccagcctggccaacatggtgaaacccctctactaatactacaaaaattagctgggcatggtggtgcacgcctgtaatcctagctactcagaaggctgaggcaggagaatcactttaacctgggaggtggaggttgcagtgaggtgagatcacaacattgcactctagtctgggcaacaagagcgaaagctctgtctccaaaaaaaaaaaaaaaaaaaaaaaaaggcttgtgggaaggagacatataacagaatataccattaattttgggagatttccaatatttatctaaatgaatatgaccattgttcacataagcttaggttcatccataaaaattccttaaagttctagtaatcattttgttctccttaagcattttgaattatttctatcattaattccttcagcctccattcacagctttctaacccatcagggttactttttgctaaatttacttccatttggcaacacagtcttactttcacctcagaaataacatttgataaactatcaatccattctctaaccatctctttcaaaaggtgaaatggttatatttactaatctcatataaataatatacatacatatctatatttttttatttaatagcaaccatttatcacagaaaaagggcatttagcacatgcaaactacctggagttacagatgacttgtcccttttaatttttaatagactttatttttagagccgttttagggtcacagcaaaattgaatgaaagtacagagaatttccatgtatttgcagccccctacacacgcaacctcccctaccatcaacatccagaatcagagtggtataccttttacaatcgatgaacctacactgacacatgcttatcacccaaaatatatcaattacattagggtacactcgtggtgttgtatactctacagcttttgacaaaaatatgacatgtgaccaccattatagtatcaaacaaaataagttcactgccttaaaaatcctgtgctccacctattcatccctccctaccatctcccaaaccttggcaatcaatgatctttttactgtctccatagttttgccttttccagaatgtcacatagtgggaatcatatagtacctagccttttcagattggcttctttcacttagtaatatgcatttgaggttactccatatcttttttttgtttgtttttgagacagagtcttgctctttcacccaggctggagtgtagtggcatgatctcagctcactgcaacctccgcctgccaggttcgagcaattctcgtgcctcagccttctgagtagctgggactacaggcacccaccaccatgcctggctaatttttgtattttagtagacacagggtttcgccatgttggccaggctggtctcgaactcctgacctcaggagatccacctgcctccgcctctcaaagtgctgggattacaggcgtgagccaccacacacaacctactccacgtcttttcctggacaaacagtttatttctttttagcactgactaatattccattgtctagattaccatagtttatgcctgttattttcataagagctaaaggtcttaaaattacaggtctcaaacttttactatctctttcacacacaaaatttcatgtttttaatgcacaaaaagtggtattttaagatattttcaacttactgttacatattagaaacttgtatgctggccgggcacagtggctcacgcctgtaatcccagtactttgggaagccgaggcaggcgtatcacctgaggtcaggagttcaagaccagcctggccaacatggcgaaaccccatctctacaaaaaatacaaaaaaatttagctgggcgtggtggtgcatgcctgtaatctcagctacttgggaggctgaggcaggaggatcgtttgaacctgggaggtggaggttgcagtgagccaagactgtgccaccgcactccagcctgggccacagggcgagactacatctcaaaaaaaaaaaaaaaaattgtatgctgaccacgtctatcttttcgctaagtttttgatacaaaataaatcataaagtatacttaaattaacctctgtctcagcttttcatataaatgtattttgtctgtaacctgttaaataacaggaaaaatactgaattttgcaacatctaaaataaaagcaggccagggccagttgtagtggctcacacctgtaatcccagcactttgggagaccaaggtgggtggatcacctgaggtcaggagttggagaccagcctggccaacatggtgaaatctcttctctactaaaaacaaaaattagccaggtgtggtggcacatgcctgtaatcccagctacttgggaggctgaggcaggagaactgcttgaacctgggaggtggaggttgcagtgagccaagatcgtgccactgcactccagcctgggcaacagagccagactccatctcaaaaataaataaataaataagtaagtaagtaagtaagtaaaaaataataataaaatggaattttaaaaaaataaaataaaagcagacaaaaaataaaagggttaaaatatctacataaattagacgttaagtattatcctctagcataagtatcatatccacttccatcttcctctccactccagtagaggagtaaatgagagcctgttcacctcagtctacttacttaaggcccttaactaattcatttatctttcccattaaaattaaacagaaggtttatcattctgcttagttatattcagatgtgtcactgatagctaattatacaaataaaacaagatgactaatatactacctactcctagtaggcaaccacagcattgtaaagatggttcaaacattaagttatctacttacccatttatgaggaactaaacaagtcaagatgccaagaggaaacccaaggaatatcttcccaaagtggttgttcattatactcagctcttcaaaactgtattactacagactttcagatagcaaagttagagttttggttgtttctagctctagcaggatatataggcaattgaaatgggggtggagggtatcccataaaacaatattatccggttatgaaaaggaaggaagtactgacacatgctacaacatgaatgaacctttatgctaggtgaaagaagccagtcacaaaagaccatatattgtatgatcctattattatgaaatgtccagaacaggcaaatctatagagacaaaaattagattagtggttttcagggacaaggggaagcagaaaagcagaagtaagtgtaacaggtatgagggggtggttcttcttggggtgataaaaatgttctggaattagtggtggcgattgtacaaccttgaaaattgtactaaaaaccgctgaattgtacacttcaaaatggtgaattttggccgggtgcggtggctcaggcctgtaatcccagcactttgggaggccaaggcggacagatcatctgagatcaggagtttgagaccagcctggccaacatgatgaaaccccgtctctactaaaaatacaaaaaattagctgggcatggtggcaggtgcctgtaatcctagctactcaggaggctgaggcaggaaaattgcttgaatctgggaggcgaaggttgcagtgagttgagatcgcaccattgcactccagcctgggcaactagaacaaaattccatctcaaaaaatatatatataaatacataaaataaaatggtggattttatgatatgtgaattagatttcaatttttaattttattttatttttaaatagagacagggtctcgctattttgcccaggctggttatgaactcctgggctcaagcaatcctcccgcctcagcctcccaaattcctggaattataggcacgagccaccaggcccagcctggatttcaattttaaacagagtcatttgaaacctatcccttaacacaagtatgagcaaattatgtcttaatttaataacctgttttttaaagaaaaagtcaaatggtaagggatcaaaaagaaaatctcaacatttatgttataagagaaggacatttcattaaaatgtccttctcttctcttcctcagataattcacagtagaaagaataggcagatggttgctaagccttaggcagaatcattcctttgcctcaacacttgggcaaaataacatactaatggcccccactaaggctgttaagctgaggcaaagactggccagatgttaaccaaaacagtttcctcttttgcttgggcaaatagctaggctatccaccccagcccctgcaggtagcctctgactgacttatagccactgaagtagtagtaaaagtgatgtgtgctactcctaggcctggtccagtaaaaaccctccacacacgatgctccatgccctttacccttcctccaacttaatgcaggtaagacaaacttagaagctataaagggggaaatgcccatgtctccgcaaaagccacccacttatctgaaacatccactttttaaactttacgtaagcaagaaataacatttgagtcattaatatataatttttgtggctagttcgttatagcaactacagttagcttaacatatatcagcttataaacatgtactaaaatcctcttaaaagttagcattccaaattatcaaaggtatgttaccccattacgctttttttttttcttgagacagggtcttgttctgtttcccaggctggagtgcaatggcacaatcacagctcactacagccttgacttcctgggctcaagcaatcctccaggctcaagtgatcctcccaagcagttggcactacaggcgtgtgccaccaggccaagataattttttgattttttgtagagacaaggtctcactatgttgcccaggctggtctcgatctcctggtctcaagcactcctcccgcctcagctttccaaaatactgagattacaggtgtgagccattgcctccagtccccattatgttttaaaaatagtttacttcggctacttgggaggctgagacaggagaattgcttgaacccaggagacagaggctgcagtgagccaagatcatgccattgcactccaggctgggcgacagagtgagactctgtctcaaaaaaaaaaaagaaaaaaaaaaaaaagaccatggctcacgcctgtaatcccagcactttgggaggccaaggtgggcagatcacgaggtcaggagatcgagaccatcctggtcaacatggtgaaaccccgagatcaagaccatcctggccaacatggtgaaaccccgtctctactaaaatacaaaaaattagccaggcatggtggcacactcctgtagtcccagctactagggaggctgaggcaggggaatcgcttgaacctgggaggtgggggctgcagtgagccgagattacaccactgcgctctagcctggcgacagagcaagagtccatctcaaaaaaaaaaaggatagtttacgtctgttattataaatgattttctgaatgtttttctggtggtatattctctcctgcctaacacccacagcaagaacctgaacagaaactgttttatgactttgtgtatttcatgttttctttacatatactgtgatcctaaattttattattatctttgtaggtacttacaatataaatcatgtaacataaagatcatatataattgatcatataatacatagaaaatattagaaaatatacacacatacaccaagatcaaataatacaaattcagaacctttcttttctgaaaatacttacaataactcagtacaacaacatatccaatgaactcagcttactcaaggcctaagtcccataagatggtataaacacttttgagaagtcattttaaagtgtggaagagccatctctttaaagtcctgaatgccactaaggaatcagttaaagggaaaagaaaaggaagtagaagggaaggggaaagcaggaaagaaaagcccacctggcaaggactatagacatcctcgaaagcctcaagtaccatgaagttaacctatacctatattgttgcattccatttgaagtgtattaaaaggtcatttcttgtttaatagttatcacataaacctaaacttcaaaacgatctcagggaaaattctaaaaccttgtcattttactcatcaaaactagctccaagccgagattaactggaaataaacaagattctgttcatcctatcccaaaacaactgataagtaactgccatttttaaaattgctaattttctggggagtaaaaaaaaaaaggcaaatcatgttatctaaaaagaaaaaaaaggtgagggggcaagaaaaaagaacaatcaaaagacaaatccaaaatttcccctttagaataatgatggagatacttcagcctcattttgagcgctctttctatccgtctttccaaaaagcaagaggataagattaaggcaggaagagccacctgctctgccggctcaaaatcagagcttacctcctgagattgatggcctttgccaagtttggaacaccttccatctctgttgtcttctgccccatcagactgctgataggcctacggggggaagaaagagaaacagacctgctagaatgccatatccaactcattatttgccttctcaaaaggaatcatcagtttttactgttcctggaaggcagatagtccaactgttgctgggcctcagaagattgacatgtggtctttcagaaacttctccttgaacaatttagcatcagaagtcccaacaggtaagcaaggctgacttaagagcaaagaaatctcagacaaccacatcaaaacagtaataacaacctctcctcaccaactaagtcctttaccatgtctctcaacttcaaaaaattttcagatattatatgttattaatcaatgacacaatgtgaaattatacatattttaaagctatcatgaatcaatgatcatattctcaaaacagagtaggataacttcaaagaatcccagcggtagaaacttctagtgatctgacagttccctgtcttgaagatgttacttaagccatccacaacaaagctgatgattctcctacctaaagtctctacgtagggacagtccacgcttaacctctgcacatattcctgtgtatcaccctcatggccaagaaatacttcctcatgaccaaccaaagccaaaaaattcattttctctcacttaatcttccaaaataacagacaaacagcttgctacactccttatccatccctttatatgtttgaaagaataatcaaattattcgtattttccctgttctctaagcaaatcaccagaaatcctttaacttttactcataaacttaattttctgatacctttagttctagatattaattataaattacaactttaagcttctcaatagacaacactagactcaaaaatgaaagagcccaaatacagataataaaacataaaacagctaaagaccacaagtattacctaatgaagcagaagtaatgttagtgtttgcaaaaactatcttgtgcctaattttctactttcccactcatatgtaggctctaaataagaaacagctgatatatattgtttattaaatatatagatattcttagtattgcaaagaactagattctgattaaacagactaaaagtagctttctaaataattaacttgtcattcttttaaaaccaaaagatataattcaaactcctaaagctgcctcattaaaaaaactttcaacaaaaacacatatcatcattaaaatatatatatataaatcttcgtaatctacttttatcattcttaaaattatgtagaaggaattgcctattgacatagaactaaagtggaaaaagtgtcctattacagtattatttaattttttcaaaatactaacattcattgctaatcacaaagcacagtaaaggatctgataaagttttgtacaagcctgaatgtatttttttaggtgatttgaaaaacagcgacagaaaatatttaggctctctcaaatattaactttgatatgaaatgatacttggcaactttaaaatggtttatgtgctgtgaaaattcttaatttatcaatcaccttgtgttgaaggtctgttttaagccttatttaattcctttaaataaatttaattaattaaataaaatttaaacattcctttaaaataaaaattatgttattgtttatgttaatatctcccccaactttctatctagtggagtgcttattcttatgaccaagaaataagaagtgttttccttctaataataatgtttcaaagtgaaggcttgcaggtattttactagactaagatcctgacacaagatgtaaaaagcaaaggaatgttacatgggggacaaaaaaggtagaaaggtcaaagtataaggatctaacacatttgacttcagtgccaacaacatttttccatttaattcaaaaagacgaattttcatttaaaggaaggaagggcggaattaaagaagagtctaaatataacagcttaaaatcacagccacgggtgcagtggcatgcacctgaggtgggctccctcacgggagggctgaggtgggaggatcacttaaacacaggaattagaccctcatctcttaaaaaaaaaaacaaaaaaaaaacctgtactccccaaaaaacatagccaccaaattaagaagtactcactaaaaaaaaaatatcactgtcatctaaatcttttcatcttctccacaaaaggcaatggctctatactcagggaagaataagttgtaaatccaaggagcctgagggcaacagaagcttcctaagagagaatcaaataataaatgattctatatcagctctgtgtgctaatatgctgtaaataatgcttcaaattcataagttatgacaagcaaaatggaatttactactaacccttacttctccaattctattgacattagaaatggccaaactattatatgccaaaaagcactaaaattctttgacctacttccttaaatatattctaagaaaactaccaatagaagggaaaacttgtagatgtaaaaaaatatttactgcaatatgattcagtataccagaaaaaatgaccaaccaaccaacagaagtttttggtttttttattttaaatttcttacatttattttaccctgattcacctcttcattccacaaaggatttgagacagtttacaatagagcataatatattaattatacatgtataaaacgtggatcaagaaaaaaaacaatttaaatatgccaaccaggtaaggttcaaactagttgttatggttgcatttcaacgtttgttctgtttctgggctgccatggtaaaaaacacagtggccattaaataattctcattagaggaaaaaataaagcatagtcctcagggaaaacaaaaattgttaatagatggcatagcttctggatggtggatttatgtggacataaaaataataatgaagattatacaacaaggaaaaatacttatgataatgttaaggaaaagatacaaaattaaatatacatcctaaccacaatgatataaaaatataatatatatgggaaaaagactagtaggccatacgcataatcttccccttcctccccccactaaactatgatttctttaaccacaaggaccatatcatactcttgtgtaccacaaccatacctaggcagaatgctaggcatactggaccagtttaatattttcaactgtattaaaatatctatacttgcttgactcaaattttagatatttggcttacaagatagaaatacacaacatacaacagagacaataaatataaaaagtactttctgacaaagacctattactgccacactatgaatggcaaagttgattacactccttacacacttgaaaagcaccaaggctttctcaattcacaacttccttattccacacaatatcgattacagactcttccttaaggttcataagatattaacaggacgtattattgctgctccagataaggaataatatacagcattttaaaaaatcctttattcatgttggaaaaagtaaaaaaaatttcttatattcatttagattttgaaaagtaatcagaaatctccaaaatcaaacatgaccaaaaattgttaaaaaacatattatagactcaacttttcaacattgttaaatcatgcaacatgatagattccatactatcaaaagctgtaaagtgtgtcttttaattcagttcctatttctttactttttcttgcttctcaaatagcaaataactttaaccaaaatttccccttttaacaaaggaagtagtctttagagcagaacttgaatttttattgtggctattttttaaaagggatgtgtgctcctaaaatatgttcatgagaattgacaaactcagtcttttaaaattaaagacactaatacactgtataaacatgaaaactagaaaaggcatccagcactcaaacaaatggcactcaacaaaaaaattgcatccacctctcctcccactacaggtactgcgaacagtcatctcagtgcccctaaataaatgtttattttaaattaaatgttgggttacatttactttgtcacaaaattcatattttctttttttgttttagactgagtcttgctttattgcccaggctggagtacagtggcgtgatcttggctcaatgcaacctccgcctcccaggttaaagcaattctcctgcctcagccttccaagtaggtgggattacaggcatgcgccaccacacctggctaatttttgtatttttagtagagacggagtttcacccttttggccaggctggtcttgaactcctgacctgaggtgatacgcctgcctcggcctcccaaagtgctgggattacaggcgtgagccaccgcgcctggtctcatattttatttaaaaaacaaaaaatcaggctaggtatggtggttcatgcctgtaatcccagcactttgggaggccaaggtgagcgtatcacctgaggtcaggagttcaagaccagcctggccaaaagggtgaaactccatctctactaaaaatacaaaaattagccaggtgtggtggcacgcacctgaagtcccagctactcaagaggctgaggcagaaagaatctcttgaacctgggaggcggaagttgcagtgagccgagatcgcgccactgcactccaacctgggcaacagagcgagactctgtctcaaaaaataaaataaaatcagtcacattaagattagatagcccagatcatctgttttctattatacaaaacaagaattaatgaactcctgacataacatttatttcaatttgttttcatcttttaaaaagcactcattcccaatcttggttttccaatagtatagggaactaatgatacttaaagattacttcctacatcacctttttaaaaaataagaagtttttaggctgtgtacagtggctaatgcctgtaattctaacatgagagagatcaaagcaagcagattgttgagcctaggagtttgagaccagcctaggcaacatggcaaaaccctggctctacaaaaaatacaaaacttcagccgggcgcggtggctcatgcctgtaatcccagcgctttgggaggcagaggtgggcggatcaccagaggtcgggagtttgaggccagcctggctaacacggtgaaaccccatctctactgaaaaaatgcaaaaattttccgggcgtggtggtgggcgcctgtagtcccagctactcgggaggctgaggcaggagaatggcgtgaacccaggaggcggagcttgcagtgagccgagatcacgccactgcactccagcctgggcaacagagcaagactccgtctcaaaaaaaaaacaattagccacgtgtggtggcatgtgcttgtagtcccagctactcggagcagaggtgagagtactgcttgagcctgggaggttgaggctacagtgagccatgatcacaccactgcattccagcctgggcaatagagctggaatgtctcaaaaaaattaagaaataagtaatttttaaaattaaaaataagaagctttgattcatattgcagatttaaaaaaaaacaaaaaacaaaaacctaaggtggtaaagtgaaaaaacagtcaaataatttccccccagaaaaagtgggggaatgtttaagtgtggtaaaataaaaactctgaagaaaatttaagatacacttagaattcatattacaccagttaaggcttagaaaaaaacaaaaggaagagaaaggaaaacaattcactagaaaagagaaaaagactccaatttcaggagaagggagtaagttccaaagcattaataaaagatgactcaggccgggcacggtggctcacgcctgtaatcccaacactttgggaggccgaggtgggcggaccacaaggtcaggagttcgagaccagcctggccaatatggtgaaaccccatctctactaaaaatacaaaaattaggccgggcgtggtggctcacgcctgtaatcccagcactttgggaggccgaggcaggtggataacaaggtcaggagatcgagaccatcatggctaacacggtgaaaccccgtctctactaaaaatacaaaaaataagccgggcgtggtggcgggcgcctgtagtcccagctactcgggaggctgaggcaggagaatggcgtgaacccgggaggcagagcttgcagtgagccgagatcacaccactgcagtccagactgggcgacagagcgagactccgtctcaaaaaaataaaaacaaaacaaaacaaaaaaaacacaaaaattagccaagcatggtggtgcacgcctgtaatcccagctactcgggaggctgaggcaggagaattgcttgaacccaggaggcagagtgaaccgagatggtgctactgcactccagtctgggtgacagagcaagggtccagctcaaaaaataactcagttcatagaaaaaagatttcgtgttatcaacttcgtgcatctgaacggtcaattttgattaaccacagtttgtaagttccttaattgttctttatacagcaagctttatttcagaaaggaacagcagactcccaggggagaaattctttggaggataatatattcataacaaaaataaagtttttagatcaaattaagctcaagaccatatctaatacttgatgaagaatttcttcctcctttccctagagtattgtcaattatttttaaatgatctcatttttataaagtctttgaattaaaatggaaaacataattaatgcttttggagagaggaatgagaagatggataccacagaatatgacaattccaaaaaaggtatgactctctggactggataacaaatctgggacaatgaaaaaaaaattgacatactcaaacagtcccctaaattgatcacttcccttaattaagaaaccactaggccaggcacagtggttcatgcctgtaatcccagcactttgggaggctgaggcaggtggatcaactgaggtcaggagttcaagaccagcctggccaacatagtgaaaccccatctctacaaatatacaaaaattagccaggcataatgacgggtgcctgtaatcccagctactcgggaggctgaggcaggaaaatcgcttgaacctgggaggcggaggttgcagtgaaccaatatcatgccattgcattccagcctgggcaacagagccagactccatctcaaaaaaaaaaaaaaaaaaaaaaaaaagaagaagaagaagaaaagaaaccactatattttgtttacatttattagaaaggaataggaaacagattttttaaatttagtaataaaagggctaatgtatgtgaaataattagtaattcattccacttagatacttttgggaaaaaaagaagcagtatcttctgcttcttttttgagtgtgagacattttaaaggtactttgatatcaaaaatgcaatttcaagtataaggtaattcttcctctaatcacagaagccaattacttaatgcacaaaaggatgttagacaaggaattcttttccaagtcaaaaaaggaattctggtcgagcgcagtggcttacacctgtaatcccagcatttggggggccaaggtgcaaggatcacttgagaccaggagttcgagaccagcttgaacaacataacaagaccccatctctacaaaaagttttaaaattagccaggtatggtggctcatgcctgtagttccagctatttgggaggctaaggtgggaggatcacttgagcctgggagttcaaggatacagtgagctatgatcgtgtcactgtactccagcctgggacacagagccagactcggtctctgagaaaaaaagaaaaagatccagcacttcaggaggccgaggcatgtggatcacgaggtcaggagattgagaccatcctggctaacacagtgaagccctgtctctactaaaaatacaaaaaattagctgggggtgatggcaggcacctgtaatcccagctactaggaaggctgaggcaggagaatcacttgaatccaggaggcagaggttgcagtgagccaagatcgcgccactgcactccagcctgggtgacaaagcaagactccatctcaaaaaaaaggaaaagaaaaaagaaaaagaaaaaaaatttttttcaggctgggcaaggtggctcatgcctgtaatgccagcactttgggaggccgaggcgggcggactgctttgagctcaggagttcaagaccagcctgggcaacatggcgaaaccctgtctctacaaaaaatacaaaaattagccaggcatggtggcttgtgactgtagtctcagttactcaggaggctgaggctagaggatcgattgagcccaggaagcacaagtcgcagtgaacagcgatcctgccactgcacacgttagacagagtgagatccggtttcaataaataataatttcttattgaaaacttggtacccaggctgggcgcagtggctcacacctgtaatcccagtactttgggaggccgaggcaggcggatcacctgaggttgggagttcgagacaagcctggccaacatggtgaaactccatctctactaaaaatacaaaaattagctaggcatggtggtgcatgcctgtagtcccagctacttgggaggctgaggcaggagaatcacttgaccccagggggcggaggttgcagtgagccgagctcacaccactgcactccagcctgggcgatagaacaagactccgtcttaaaaaaaaaaaagacagaaagaaaactttgtgtaccctgcagatatcaacaagaaaacttaatacgtaaaacaatgaaaggtaggctgagtctgtcaactgtgtctttagtgtttggttctaaaagattatataatcccttcatgctaggcatagtggctcatgtctgaaatcccagcactttgaagcccagaagtgcgagaccagcctgggcaacataatgagatcttgtctctatctatctatcttatctagctatctagctatctagctagctagctagctatctagctatctatctagctatctagctatctagctagctatctagctagctatctagctatctagctagctatctatctagctagctatctagctatctagctagctatctatctatttctttgagacagtttcactcttgttgcccaggccaagtgtagtggtgtgatctcggctcactgcaacctccacctcccggggtcaagcgattctcctgtctcagcctcccgaggagctgagattacaggcaagtgccaccatgtccggctaattttgtattttcagtagagacggggttctccatgttggtcaggctggtctcaaactcctgacctcaggtgattcgcccgcctcgacctcccaaagtgctgggattacaggtgtgacccaccgtgcctggccttgtctctatttaaaaaaaagtacaatcaaattaggatttaaacattacctccaatagttaaattttctttcttgaacagaaaaggttcaactcttgaaatgtaccaaaagcttgcaattgccacaagaccatttctccagatgaatagtattcatagtaatgtgactacagtactatatctattagtggatgccctgtggagtccatcatgcagtcctccgagatttcaaatttttttattcttttgagacagggtctcactctcttacccagcctggagtgtagtggtgcaatctcagctcactgcaacctccacctcccaagctcaagtgatcctcccacctcagcctcccaaatagctaggactacgggtgcgcaccatcatacccagctaatttttgtatttttggtagagacggggtttcaccatgttgcccaggctggtctcgaaaccctgagttcaagcaatctgcacgcctcggcagcctcccaaagtgctgggattacaagtgtgaatcaccgcgtctggcctcgttttcttaatttttttatcataaagacaggatctcgctatcttgctcaggctggtctcaaactccaaggctcaagcaatcctcccaccttcacctcccaaagtgttgggattacagccatgagccatcatacccagcaaacctcaaatttctatggtagaaatcatagaagtcactcaatgtattcaatggtaacaaaggtatccaacaactctgggtatccacaaggctaaaaacacaaagcatgacacacggctcattttctctcgctcaagttggcttctgttaccaaacatccattggccctcttctaggacatctgcttaatagccacttgagttctccttgaattctagaatgcttgaactccagatttccagtggttttaatttagctctattccgtctttccagagtactagagagaacagtcagttctcacacacgccccaagagtgctggcgaaggcattccatcatgaatggctgtacctttatagctggtgtcactatgtagccttcatgagtaatgtggatagagtagctgcctggccatcctttgctccctaggattctgaaagtttacaatgctgggagaaaagcagagaattgtctgcctacctatatcagacatgaaaataggccataaagtttctcacctttttttttttctaattttgacttaattaggtctgtttttattagccaaaggggaaaatcatccttgaggtttgaaacaataattttaaaaaccaagaaaatatgaaattatattaaaaataaaatgattctgaaaaatgaagttctattccccccaaatggccccatttttccattaaaaaaaggagcaaaaaagaggattcagtacttttttttctccagtatctaattacatgcttaggtaatttttaaatacatacttcaaagctgtaagtttaccttacatttttacatttcaaagcaaaacagaaaaaatggagctttgtgtacttgatcaaaaatagaggaaatgatccacacatacacacacacttgcataatggttaaagcataatgttaactacaaacaaaggctgagatctaaattgaagtgagtctgatcgatatatctggtttagtcagttctgcacacatgggtaccatgtgaaaatgtgaataaaaaagaactaaccctaggtcctaggtctcactcttgagtctgggatgacaattccaagtttgtatttagaaccttagtcgaatttcaggatgagtcattgcaccattagagccaattcctttttttttttttctggggggtggggggacacagtttcattctgttgctcaagctggagtgcagtggcaccatcttggctcactgcagcctctgcctcccggattcaaatggttctcgtgcctcagcctcctaagtagctgggattacagtcatgcacaaccatgctcagctaatttttgtatttttagtagagacgaggtttcaccatgttgaccaggctggtcttgaactcctgaacccaagtgatcctcctacctcggcctcccaaagtgctgggattacaggcgtgagccaccacgtctggccaagcccaatctttagtgtacttatgagaagaaatgttttacttactctggtcagcatagtttttcgctttcagctcaagttgtcttgtttgagattctaaagattccactcgggtctgtaagtcctttttttcctgttcttgagagtcttcaaattcaatgaatttctaataaagaagaacaatataaatttaatcagagaaattaaactttacattttcaactcctgttatttcttggaatcaataatcacaattaggtattaactacttagatctcagaattatgaccttgggttgatttttagtttttctataaaaattaagtttaaaaaactcccaaatatagaagaaaaaaataacaaaataattgtttccacttcatgttataggcattccatatgatatacatatcttactacaaatatataaacccttttgtatacttgcatatgcatcttgacttccagacaacttaaaaatctataacatgtacaatagagaacaaaagaatgatggaataatcaataaatatttgttaaatggttgtgtgattaatagtcatagattcacctgaaccatggagtttaaattcctaagaaaaggacatgtcctaggaataactccaccactcaaatctaacttaccaaacctgttctcatcaaggatagtaacactaagtgcaatcattaaatctcagtcttcatcttgattgttgtatcagcaacatctgacaagtgatccgctctccttaaaactttttttttttttttttaatttggctaccaggatgttttcttgtttgctgctcgttcttggtcttctttggtagtacctccttttctccccaacttcttaacattggcatgctccgtccttggacacatcttctcttccttgtttacacttattccctagtgatcgcgtccagtttcatggcgttaagtacgaactatatgctgacaacttctgaatttctatctctagcccagacctgaattccagatttgtatgtccaactgcctactagaaaacttcaattggatgtttaaaaagcatcttaaggctgggtgtggtggctcacgcctgtaatcctagcactttgcgaggctgaggagagcagatcacaaggtcaggagttcaagaccaacctggccaacatgctgaaaccctgtctccactaaaaatacaaaaattagctgggcatggtggcacgttcctgtaatcccagccacttgggaggctaaggaaggagagttgcttgaaccgggacccgggaggtggaagttgcagtgagccgagatcgcaccactgcactccagcctgggctacagagcaagactctatctcaaaaaaaaaaaaaaaaaaaaaaaaaagcatcttaaattcttaaatttagcatgtgaaaacttgctcctctcctggtcttctctagctcattaaattactgtggtcagttactcaggaccaaaactctggagtcagctttgactcttctgtttctctagtacctcacatatccaatccatcagcaaatctaccttcagatctgaccgcttttcatcatttccaccaccatcctggtgtgtgccacaatcatctaatgcctggattactgcaacagtgaaagtctcctaattagtcttcttacttccaccctaatcctctacaatatattctagaggatctaggaggattctttaaaaagtcagccagccagcctgtccaacatggtgaaattcggtctctactaaaaacacaaaaattagctgggcgtggtggcaggctcctgtaatcccagttactgaggaggctgaggcaggagaatcgcttgaacccaggagacggaggttacagtaagctgagatcacgccactaaactccagcctgggcgacagaacaagaccccctctcaaaaaaaagcaggccaggagcagtgactcatgcctgtaatcccagcactttgggaggctgaggcgagcagatcacctgaggtcaggagttcgagaccagcctgaccaacatggagaaaccccgtctctactaaaaatataaaattagctgggtctggggcgcatgcctgtaatcccagctatttgggaggctgaggcaggagaattgcttgaactcgggaggcagaggttgcggtgagctgagatcacgccattgcactccagcctgagcaacaagagcaaacctctgtctcaaaaaaaaaaaaagtaaaaacaatttatcctctgcttaaaacgctctagtggtttaaattctttaccatagcctctaaggatctacacaacatgcttccaccattctcttacttctttgacatcatcccctacttctcttcctaccctcttctccttcccattctctgattcaagcatccatgcagttcctcaaacacttcaagcctcagcacttgcttcctactacctagaattctcttcttccagatatccaaacagcttgctctctacttacttccttcacatctttgttcaaatctcaccttcttggtgaaggcttctttggccaacctatttaaaactgtgataccaggccaggcatggtggctcacgcctgtaatcctagcactttgggaggccaagacaggtggatcacttaaggtcaggagtttgagaccagcctggccaacatggtgaaaccccatctctactaaatacaaaaattagccaggcatggtggtgcacgcctgtaatcccagctactcgggaggctgaggcaggagaattgcttgaacccaggagatggaggttgcagtcagcctagattgtgccactgcagtgcattctggcctgggcaacagagcaagactgtctcaaaaaaaaaaaaaaaaaaaaaaaaaaacctgtgatacctactccctatctctcctccctgtttattttctttagagtacttaacctcatccaacatgctattttagtaattaatgttacttattacttgtctgtcctcactagaatgtgggttccatgaagtcagggatttttgttttgttcactgctgtatacccagtacaaagaatgatgatagcagcacatagcaggttctcaaatatttgttaaacaaatgaataaatgaagaaaattttccaagttaaaaaaactgaaacccttatagaaaaatttataattcacaaaaaacttaggtatcactacaatatatcctagttttaacatgaaattgtcagtctattacctatattaactgtcctcaaacttttcaatcactgcagaggacatgggtttttgtttttgtttttttgtctacacacattacgttcctttggggaactttctctctccagtttcatgctaagtatattcagtccatgtaatttgattggtgatgaccccaactccctaggggtgggcacatgatttgaaccaaactgagatgtcctctctgggacatctgccagttcttaaactctaaaaacctagcaggcctaggctgcagactgacatctttttccagcatagagaagagcaggcctgagactaaagccaatatagagaaaaagagcaaaggggagaaaaactttaattaaagatactatttgtacccaggattcctggagccagaattttcccagtgtgttttgttcttttcagttacaaaatccaataaattccttttttacataagcttgagttggtttttcttttttcttttttttttttttcttttttgagactgagtttcgctgtgtcccccaggctggagtgcgctggtaccatctcagctcactgtaacctctggctcccgagttcaagtgattctcctgcctcagcttcccgcacagctgggattacaggtgcctgccaccgcacccggctaatttttgtatatttttggtagagacggggtttcaccatgttggccgggccagtctcgaactcctgacctcaagtgatccacccacctcggcctcccaaagtgctggaattacaagcgtgagccaccacacacagcctctttattttatttatttatttatttatttatttatttatttatttaagatgtaggtctcactatgttgtcaggctggtctacaactgctgaactgctggcctcagactcctgggctcaagcaaccctcctgcctcagcctccagagtagctggaactacatgtgtgagccaccatgtttaactttcctgatctttgaagcctgaaaactacaaaccctataacattggttcttaatcattagggggtccaaagaccaatttggaaatttgatccatctatgaaccatatttccccagaaaaaacgcccccgcccatgtcaaatgccacctatttttctcagagggcttagagacactgtagttccttccacaaaccccaagtttagcacctcttcgctatacttttctatgaaaacatttcatatttgtgggacttctggggaaatcaagtcactgtttatttttcagaatattcaagatgaccatatataggaaaagtaaaggttacagtaaatataggaaaagaggcaaactaataaatcattcattcattcaagaaacatctactgactacttactatgtaccaggcacagggaacatgactatgagtatccaactagccctgccttccaagtgttcattggctagaactgaatgcaagcagatgatgtaaggttacgttaaatagaaaagcagaaactatgaagtctgagtaagttatttcaacattttgccttgatatataagcaaagactaagaattaataggaaaatgtaattattttttggcctgctttgaaaatgatgctcccttggctaacttaactactatatctgggaaagtaaccaaaaaaaaaattttttttttggagatggagtcttgctctgtcacccaggctggagtgcagtggtgccatctcagctaactgcaacctccatctcctggcttcaagcaatactcctgcctccaagcaatactcctgcctcagcctctgcgtagctgggactacaggcatgggctaccacgcccagctaatttttttgtatttttagtagagacggggtttcaccatgttggccaggatggtctcgaactcctgacctcaagcgatctgcctgtcttggcctcccaaagtgctgggattacaggtgtgagtcactgcacccagtccagaaattcttatattaggcacctcttgtgttacggataaaatgctgttttaaagaacatacagcattatgtttaccaagtaacacttaagatgctgtgctatcaaactgctaacaaaaaattttaccactattttgctttttatttatttattttttttgagatggagtctggctctgttgcccaggctggagtgcagtggcatgatcttggctcactgcagcctccacctcccaggttcaagcaattctcgtgtctcagcctcccgagtagctaggattacaggcatgagccaccatgcctggctaattttggtatttttaatagagatgtggtttcaccttgttggcaaggctggtctccaactcctgacctcaggtgaacccagcactttgggaggccgagctgggattacaggcgtaagccaccgcacccagcccagaaattcttatcttaggcaccttttgtgctatggataaaatactattttaaaaaacatatagcattatgaagatgctgtgctactaaactgctaccaaaaatttttaccactattttgcttatttacaactcctttctgcctaataggagacacctaataagggacacacagtttcacatctgctttgttgcttagcgaccaagttcagcttcagaagatggataccacagaatacgacaattccaaaaagacctacctttgtggaatgattcaagcttcagaatttttcacgttttattatgactactgaggctttttatctatatcactttaaataaatatggcagagagaaaagagatttttttttaagtgatgtgacaggtcttggattggcaaggctattatctccaaagagaaatctcgtttctttagtttcctttcacaggaaagtacgagcaataataaaaatatttcaaagcaaatacatactttgagtcatttccttcaaacaaattaaaacagataaacttagagattacaaaatggaatgttgtctttcacaaacgtgtgcacattttctcctttcttgttctaagtagatcttaaacttcttggaatcataaactcttttgagtatattgtgaaaacagatcttatacccagaaagataaataggtgaaactcaaagctatatacatttatcagtgcatcttcaagttctaaaagaaatcaaggaggatttttccccatttataaacactattgaggttgattttgtaaaaataattttttatcctcttggaaatcatttttttttttttttttttttttttgagacagagagtctcactctgtcgcccaggctggagtgcagtggtgcaatctcagctcactgcaacctccacctcttgggttcaagcagttctcgtgcttcagcctctggagtagctgaatcaccatagctgaatcaggcatgcatcaccatactcagctaatttttgtatttttggtagagacagggtttcagtatgttggctgggctggtctcaaactcctgacctcaggtgatctgcctgcgtcggcctcccaaagcgctgggattacaggtgtgagccaccacacccggctgaaaatcccaattttaaatgtgtattaagtcttggtttggaaacgtacagctgccatcctcatttaaaatgctaatcacagccatgtgcagtggctcattcctgtaatcctagcactttgggaggccgaggtgggcagactgccagagcttaggaatctgagaccagcctgagcaacatggtgagaccccatctctactgaaaacacgataaaaaaaaaaaaaattagccaggcatggtggcatgcacctgtagtcatagctactcgggaggctgaggcacaagaatcgcttgaacccaggaggtggaggctgtaatgagccgacatcccaccacttcactcctgcctgggcaatggagcaagactctgtctccaaaaattacaggctcatgcctataatcccagcactttgggaggccaaggtgggtggtcaggagttcaagaccagcctagccaagatggtgaaactcagtctctactaaaaacacaaaagttagctgggcgtggtggcaggtgtgtgtaatcccagctacttgggaggctgaggtaggaaaattgcttgaacccaggcggcagaagttgtagtgagctgagatggtgccactgcactccagcctgggtgacagagtgagactccgtctcaaaaaataaataaaataataaaataaaaaataaaatgctaatcactaatatgcaacaaaaataaaagttcctcagttctgataagacatccctaatagcttacacagggcactgaaagctgagtaggataaatgtaatactaactttcaaagaataatcaagaatcaagaaaaagtaacaagtgactggaagtttctaaattgctatccaagaaaaatatccatcaaatagtctagttttgggccactgttttgagaaatatccctgacaatataggtaacctcataaacagaagttgctgtagggtagaatagctcagaaagcagaacactcataattacaaaaatacttcagaaatggcatagctctatatagcaattagcaatcatgtgaaagtgggaaacattgatataagaatttatgaatgagaaaacaggaatagaaacagagacggtgtcatgaaattcaaacagatgccaaaatacagctcttggcagaaaaaggtttggattcgtggtcctagtaagagtcctcttttttcctggatgaaggctggaggtatagcataagggaagtaatgagaatagtttctttgtctctatacctaaccttttcatactatcaacaaaatacttgggcaatgagtggcatgggttacactaaaaagaaagttctcagggctttctgcttcccttctacattcagagatcttagttgggctggtagcacatgagttctgctgaacctcattactaggtttgtatagtacaagcatggctgaccttctttattgtttaatttaatttttaattttcatttacttattttttagagatgaggtgttgttctgtcatccaggctggaagtgaagtggtacaatcatggctcactgcagcctcgacttcctgggctcaagcgatcctcccacctcagccttctgagtagctgggactacaggcatgtgccactatacccagctaaattttttttatttcttatttttagtagagacaaggtctcaccatgttgcccagcctggtctcgaattcctgagctcaagcgatcctcctgcctcagcctcccaaagtgctgggattataggcatgagcgaccatgcctggccctgaccctctttttaaagtcttcttgatttacttcaaagaaacatgtctgccttctacttctataatttccacttaacacactaactgagataacaaaaataggaaacatcccagtccgtcactctgtagtcaaagaaaaacttgtcatagttaagagactaggaaaaagctgttgtaatagttaagccacacacctattcacaatgcctattctccaaatgctaggcagttaggcagcatgatgatatttactacaaactaggtaatgtcattcataggacttattcttagataaaataacatgttaaatataaaactaaaactctttgcccacccatccaataggagtactcactgtatgagagccatcaaagacgtatcataaacatttacagtgtaacacgctaagtgctataatgaaagcagagaggaagaagtgactaaatctgctttaaaaaagggaagtcaaggctggacacagtggctcacacctgtaatctcagtactttgggaggccaaggtgggcagatcacgagatcaggagatcgagaccaacctggctaacacggtgaaacctcgtctctactaaaaatacaaaaaaaattaggcggacttggtggcgggcgcctgtagtcccagctactcaggaggctgaggtaggagaatggcatgaacttggtcggcagagcttgcagtgagccgagatcgtgccactgcactccagcctgggcaacacagtgagactccgtctcaaaaaaaaaaatgggaggtgggcacagttgctcacgcctgtaatcccagcactttgggaggccgaggcaggtgggtcatgtggtcaagagatggagaccactctggccaacatggtgcaaccccgcatctactaaaaatactaaaattagccaggcgaggtggcacccgcctgtagtcccagctactcggaaggctgaggcaggagaatcacttgaacctggtaggcaggggttgcggtgagcgagattgcgccactgcactccagcttgagcaacagagggagattctgtctcaaaaacaaaacaaaacaaaacacacacacacaaaaaaaaaacagaagttgggccaggcacggtggctcatgcctgtaatcctagcactttgggaggccgaggcaggtggaccacctgaggtcaggagttcgagaccagcctagccaacatggtaaagccctgtctctactaaaaatacaaaaattagctgagcctggtggtgggcacctgtaatcccagctacttggaaggctgaggcaggagaatcacttgaacccaagaggtagaggttgcactgaggtgagactgtgccattgcactccagcctgggcaacaagagtgaaactctgtctcaaaaaaacaaaaaaacaaacaaacaaaaaagaagtcgacaggtgcaccgaaatctcggaaatcaccactaaagaacttatccatgtaaccaaaaactacctgttccccaaaaaatattgaaataaaattatatatatataattataatatatatgtgtatatctacttattatatgtatatatatacactttattttatatatatatatatatatatatatatatatatatatatatatacacatacacacacacactttcttttttttgatatggagtctcgctctgtgacccaggctggagtgcagtggcatgatcttggctccctgcaacctctgcctaccagattcaagcaattctccctgcctcagcctcacgagtggctgggattacaggcacccaccaccatgcccagctaattttttgtatttttagtagagacaaggtttcaccatgttggccaggctggtctcgaactcctgacctcaggtgatccacctgccttagcctcccaaagtgctggattacaggcgtgagccaccgtgcccggccatatatactatttttttaaaaaagagagaagtcattttagcttactctaaaaggaatggtttgcctaaaacctttactgagataaagacattccaggcagaggtcacagcacatgcaaacgtctaaagatcatggcatgcccaggtaactacaattcaccattaaattttgagtcgatgtaaaggtaaactataaactaaagaataagttgagaatctctctgattcacaaagcgagtaaaaaagacaagtaagattccacttggccaggtgcggtggctcaagcctgtaatcccagcatttttgggaggccgaggcaagcagatcatgaggtcaggaattcaagaccagcctggccaacatggcaaaaccccatctctactaaaaatacaaaaattagccaggtgtggtggcagatgcctgtaatcccaggtactggggaggctgagacaggagaattgcttgaacctgggaggcagaggttgcagtgagccgagtccagcctgggcaacagagcaagactccatctcaaaaaaaaagattacattcatccatcttttcaaaacacaacttgagcccctattgttttaaatattccaaggtactgggaaatgtagtaagttacaagagagccctatgttctattgattgaaatttaacagaagatgaaaggtcttaatcatgggtaattacattttataaaaaagatcgatttacaaaagatcttgcataattcaacagtcacctaattgaggttaaggctgataagagatggctgatatttctgttactgcctaggtaataccaacataggataacagcacaacattggtttacagctcagtcaggctttcatataacatgatttctgaagactttctgaaatgagaaggtaacatttcaaactctgaatatgaaatgaaacttttaaaaatcacatagttcaagtctgcatataatgtaaccacactgaaattacatatgtgaacaagaaaaagcacaggccaggcacggtggctcatgcttgtataatcccagcactttgggaggccaaggagggctcatcactcaagctcaggagttcgacaccagcctgggcaatatgactctgtctccacgaaaccctgtctccacgaaaaatatgaaaattagcctggtgtagtggtgtgcatctgtagtcccagctactcaaaggctgaggtgggaggggatcaccaagcccaggaggcagaggttgcagtgagctgagagtgagccactgcactccagcctgagcgacggatcaagaccctgtatacaaaaaaaaaaaaaaaaaaggaaatgaatgctcataaaaagtctaggatagtcattaatgatttaatgtgacttaattgcttgccagtggcatgactttataagttggtcaccctctactacgcttggcaaaccttagaataaccacgatagggttaggccaacagcaaaatcgtggcaggagaagcgcagcagttttttttgtttgtttttctgtttttttgttgttgttgttgttgtttgcatattataaaaccacattagccctggaaattccagagagtcccctcagcacaagcatttgtcagatcactcaggtatgttggtatgaaacgcacatactcctccccttttctgtttttctcacacacatacccacttttttttaaggactagggggattaagggcctgtgaatgagctttttcagcaggtataataacacatcttcactaaatacccctcttccctttcaataactaataggccagcaacaacattaaagtgacttcagacaactctcctgggagcaactagacaccgttaaaaaaaaaaaaatcagtggacaatacagacttatgtcaggatctaaaaagagtaagctttgtgatgaagcaaaatgcttttaagtccagatggcttatagggactgtttcgccccactgttctggggaaaaacaaatgaatactttgaaaagacaagctcccaaagttaaaaaaaaaaaaaaaaaaaattccctaaaggttgttgcttgttggagtaaagatgcagaagaaaaaagaaagaaaagaaaaagaatagccatttaaatactttgactatagtacttgtctaaaaaatagtatcaaataaagggctggcttattaagtgtccatcaagatattatattaattagttaaatgtaattgtttttaaatgtaatttcttttaagaaataagacaggattgaagaccatattaaataacactcaagggatataatcccttccaagtccaaaatgtggaaaattttttaacacaaatgatttggtttcttctacaataaatgtcaagtggggaaaaaaagaaaaaaagaaccattatataaagaggaacttgagacatattgaaccaagtataaatgtatagactctcttgtttagatactgattgaaaacaaccaactacaaaactacatttaagagacaattagggaaatatgaacacttattaagtattaaatattattaaagagtaattgtttataagttttagatgtgttaatggtgttgtggttatatttgttaaacagccctatctcctaaagatacaatgatatagtctttggtctgccttaatattatggtgaaaaattggtttggccaggcacagtggctcacgcctgtaatctcagtgctttgggaggcaaaggtgggaagatcacttgaggccgagagtttgagaacagcctggggaacatagagagacccttgtctctacaaaaaaaaaaaaaaaagaaaaaaagaaaaagaaaaatttagctggacgtggtggcagacacctgtagttctagctactcaggaagctaaactgggaggattgctttagcccaggagttctaagctgcagtgagctatgatcacaccactgcacgcctgcctgggctacagagcaagcaaatgtctcttaaaaaatttttttttctaaagaaaaaatattggcattttgttggtaactgctgaagttgaatgatgggtatatgggagttcaaatatattctactattctcggtaatcatcaatgtttagatatttctgtaaaaaaaaaaaaaaaaaaaagttggccaggcatagtggctcatgcttgtaatcccagcactttgggaggctgaggtggacagattgcttgagctcaggagttcgagacaagcctaggcaaaatagcaaaaccctctttttaaaaaaaacaaaaaaatgaaaataaattattggaataaaagtatcagtggtgtttaatatgaaaaaagtttgtcctgccattaaaaagcaaatatgcagaaaggggcatgtacaaagacattcattgaagggctatttgtaacagttcacaactggaagataacttaaatgtctatcaacagacagtggataagaaaattataatagatctggccaggcatggtggctcacgcctgtaatccctgcactttgggaggctgaggcgggtggatcacaaagtcaggagatcgagaccgtcctggctaacatggtgaaaccccgtctctactaaaaaaatcagccaggcgtggtggcgggtgcctctagtccctgctactcgggaggctgaggcaggagaatggcgtgaacccaggagatggagctcacagtgagccgagattgcgccactgcactccagcctgggcgacagagcaagactccgtctcaaaaaaaaaaaaaaaaaaaaagaaaattataacagatccatactatggaaagtatgtaatagaaaactggtgtggtgtgtgagggtgggactgaaaacaggagggttgagtggaagtctaaaatcactagttagtaatatccctagtaggtagacagtcccacaccagactggccaggtggccttccttgctcacccacacaggaaataagaggtttgttttctcaataaactcaaccagaaattttagactaggaacactctaggcacagccaggcaggtgccaaatgacaagtggaattacatgaaggtctaaagtctacgtactaaacagtaatagggcctccttcctgccttcatccaggttgcaataatgtaaatatctaggcttacctaccactccaccagccacacctcaaagagactatccttctctggaaaaactcaagtgtctctacgaaaggaccatgggatattgaaatctgggttgccaagaggcagtaaactgtatccaggcacacaaagcttccaaccctccttttttagtgtctcacttttaaaacatgaaggataattaagaattataaggcactttaagttctagcctgaaagagagaaaccaaaactataagaaataaaaatgggactctgacaaaacagacaaagcagggaacaaatgaaaactataattaatatactcagagaccaaagaaaagtcattgctcccatggaaccagaatagtatgctatttttaaaagtagtgaggagggaaacaaaacaggaaagagcacttggaaattattaaagtatgaattgacgaatccagcactttttgtctttcttatatacaaactataccttagggtaaccaaacagttgatgaggggaagtttcctttacaagaaaatttagctgataaatgttgaaggaataactggattgaaatagcaccatttcccaacccctaatgatataataaggaatatccagttttccaggttgtctcatatatgtttttacactcaagatccaaacaaggttcatacattacatttggataatatatctcttaagtctcttttaaactctggattccccaagtaatgatccttttcacctaagtgatgatcctataatggaatactataaaaccattaaaaatatatagctatgtacttccagacatagtttgtgccagttatcagtgaatgaaactgaataggcaattcacagagaagtagaatcaccagtaaatgtaaaacatgctcaagcacactactgatctgacaaaagcaaattaaaataagaagtggtggccaggctgggcgcggtggctgacgcctgtaatcccagcacttcgggaggccgaggtgcatggatcacgaggtcaggagatcgagaccatcctggctaacactgtgaaaccccgtctctactaaaaatacaaaaaaaattagccgggcgtggtggcgggcacctgtagtcccagctaccgggaggctgaggcaggagaatggcaggaacccaggagatggagcttgcaatgagccgagaactcgccactgcactccagcctgggggacagagtgagactccatctttaaaaaaaaaaaaaaaaaaaaaaaaaagtggcagccaggcacggtggctcacgcctgtaatcccagcactttgggagactgaaggggcagatcatgaggtcaggagttcaagaccagcctgaccaacatggtgaaaccccgtctcacttgatcttagccaaaggctgagaaatgatgaaaccccttctctactgaaaatacaaaaatgagccaggcatggtggtgcgcacctgtagttccagctactcgggaggctgaggcagaagaatcacttgaacctgggaggtggaggctgcagtgagccgagatcatgccactgcactccagcctgggcgacagagtgagaatccatctccaaaaaaagaaaaaaatgtgtatatatatatatagtgatatatatatagtgatatatatagtgatatatacatatagtgatatatacatatagtgatatatatatagtgatatacatatagtgatatatatagtgatatacgtatagtgatatatagtgagatatatatagggagagatatagagatatatagtgatatatatagtgatatatatatagtgatgtgatatatatagtgatatatacagtgatatatatagtgatatatatatagtgatatatatagtgatatagttatatatatagtgatatatatatatagtgatatatatatatatagtgatatatatatagtgatatatatatatagtgatatatatatatagtgatatatatatatagtgatatatatatatatataaagtggtttcacacctgtaatcccagaactttgggaggctgaggtgggtggatcatttgaggttaggagttcgagaccggccttgtcaacatggtaaaaccctgactctactaaaaacacaaaaatcagccagacatggaggaggcatgcacttgtagtcccagctacttgggaggctgaggcagcagaattgcttgaacccaggaggcggaggttgcagtgagccaagactgctccactgcactccagcctgggtgacagagtgagactctgtctcaaaaaaaaacaaaaaaaagaaagaaagaaagaagtggtttcaaccacatcagacaggcaacagaaaccaaaaagtctgatagtgcaggaagtgttggcaaagatacaagaaaataagaagtcttttatactactgataggaatataaatcactgcactcctttgacaagcaatgttaccttatctagttaattttacaaatacatatcctaaaacctggcatcctatttctaaaatatatactttgagaagatcttacatatgcaccgaatgttactacaacaacatttgtaatatataatgtggtaatgaagaatggatagtggtatattcatgtcatcgatggaatacacagcagttaaaaggaaagaattagatgcatatgtatatcaacatggacagatcaacaggtaaaaaaaaataaaatgcaagattatataagaatgtaacagtgtgatatcgtgaaatacgtatttggtctctgacccagtttcctaacatataattcctaaaatataattcctaaaatccttagaatctccagagagatgtctttttgtatgttaatgggtagattcatggctggcagcccctacatagcttaaggatgggagctggtcattggaaagaccaaaagcataattagagggttaggactttcagcccaccccacacaacctcccaggaggggaaaggggctgaaggtgaagttgatcaccaatgaccaatggtttcatacctacgtagtgacgcctccataaaaactcaaaagaacaaggttgagagatcttccagatagctgaacacatggaggttcctgcagggtgacatgtacagggagggcatggaagctctgcaccactacccccataccctgctttacgcatcttttcatctacatcctttgtaacagtaaacataactgtttccccaggttctgcaaaccattcagcaagtcaactgaacctgaggagggggttgtgggaaccccagtttatagccagttgagactgtactggacacagaggattcatcaaaaataaaagacagtagctgggcaaggtggcacatgactgtaatcccagtgattcggaggctgaggcaggaagacagcttgcacccaggaattcaagatcagcctgggcaacacagcaagaccttcatctcataaagaaaaaaaattatggtatctacattatatacacacacacacatatacatatatatgtacatatatatacatggcaggttggtcagaagcacaggtaaaataacctgaggcttgagattggcataagtgttgtcggtagtcttggggactgagacctcaaactgtgggatgtgacactatctcaagtagacagtgtcagtattaagttagatgacacctagctggtgcctgatgcagaactgattgcttgctggtagggaaaaacactcccatatttttttatttgtttgctttttaagatagggtctcactctgttgcctgggttggagtgcaggtgacacgatcccagctcactgcaaccttgaccttcagggctcactgcaacctcgaccttcagggctcaagcaatcctcctgcctcagccttccaagtagttgggactacaggcacatgccaccatgctcagctaatttttgtatttttctgtagagacagggtttcatcatgttgctcaggctggtttcaaactcctgggctcaagcaatccacctgcctcagcctcccaaagcactgggattataggcatgagccactgcacctgccctaccccacatatttggtcacagaagtcttctgtgttatgtgtgttttttttttcaggtctgagaatgtgccagtgttgtaacaaggttcaagggtggcatatctcacacacctgcatgaacacccaatcaccatgctcatgaactacaaatacagcgggctgattgtttttggtgtgagagcagaagacagacagttcgtggttttttttttccactcttaagcaatggtttctgaattagagggaagggtgagacagttataatcacaaacaccctgagtgatttttttttccaaacacacaggccctgcctagcagcacttcttccaaccagtctcacaagcctgtgggggtaaatgggtttttacttatttatttatttatttgagacggagtttcgctcttgttgcccaggttggagtgcagtggtgtgatctcggctcactgcaacgtctgcctccagggttcaaccgattctcctaactcagcctccccagtagctgagattacaggcatctgccaccacgccagactaattttctgtatttttagtagagacggggtttctctgtgttgtcaggctggtctgaacttctgacctcaggtgatccgcccccctcggcctcccaaagtgctgggactataggcatgagccactgtgcccagccggatgggtttaaagaattggttactttgggccgggcacagtggctcacgccagtaatcccagcaatttgggaggccaaggcgggcggatcacaaggtcaggagatcaagaccatcctggccaatatgctgaaacccggtctctactaaaaatacaaaaattagccgagtgtggcggcgcttgcctgtggtcccatctactggggaggctgaggcagaagaactgcttgaacccaggaggcagaggctgcagtgagctgagatagtgccactgcactccaggctgggtgacagagcgagactccgtctcaaaaaaaaaaaaaaaaaaaagaatatgatgtaccattactacagtgaaaattggccaggcgtggtggctcacgcctgtaatcccaacactttgagagaccgaggtgggcagatcacctgaggtcagcagtttgagaccagcctgaccaacgtggagaaaccccgtctccaataaaaatacaaaatcagccaggcgtggtggcgcattcctataatcccagctacttgggaggctgaggcaggagaatcgcttgaacccaggaggcggaggttgcagtgagccgagatagcgccattgcactccagcctgggcaataagagcaaaactctgtctcaaaaaaaaaaaaaaaaaaggaaaaaaaatacagtgaaatagtagtatgttcaaagtaacttgtgacgtcatctcagcatgcaaaaagtttcagattttgaagcatttcagatttcacattttcagactaggaatgctctacctgtgttatgatgtttgctacatcagccaagtgatgccttactaactttgttacacagttatgtgcttctgtaggtatatggccaacatcttacatttctgactttaatttacagatcttcaatcctgacactgtggtttttgcttcaacacttgactctgttatgaaaatattcttctattactaaaaaaaaaaaaaaaaaaaaaaaaaaaaaactagaaattgttatcttaaaaaagacccagccaggcgcagtggctcacgcctgtaatcccagcactttgggaggccgagacaggtggatcacctgaagtcaggacttcgagaccagcctggccaaaaagacaaaaccttgtctctaccaaaaataaaaaaattagccaggcattgtggaaggcacctgtaactccagctactcaggagcctgaggcaagacaatcacttgaacctgggaggcgggagttgcaatggaccgagattgtgccactgcactccagcctgagcaacagagtgagactctgtctccaaaaaaataaaaataaaataagggtaaataagcactttgcacttaaatgtttcttcagtaagccaagataacaaactttaatgcttgagacatttaatttggctgctgagaattctgtttaattcctggcccttggctaggttaaggatggttaaaactgagccaattatggactgaattcctatcccaagataaaagtattttttaaagagttaaaactagggtcaggcacagtggctcacacctataatcccagcactttgggaggccaaggtgggcagactgcttgagcccagaagtttcagaccagcctgggcaacatggtgagatcctgtctctacaaaaattacaaaaattaactggacatggtggtgtctggcttgatgcctataatacttgtgacagtacctacagtacctgctacttgggaggctgaggtggaaggatcacatgagactgaagtcaaggctgcagtgagccataatcgtgccactgcactccagtctaggacagagagaccctgccttcaaaaaaaaatggccaggtgcagtggctcacatctgtaatctggtactttgggacgccaaggcgggaggatcaactgaggttgggagttccagaccagcctgactaacatggagaaaccccctctctactaaaaatacaaaattagccaggcatggtggtgcatgcctgtaatcccagctacttgggaggctgaggcaagagaatcgcttgaacctggcggggcagaggttgcggtgagccaagattgcgccattgtactccagcctgggcaataagagcaaaactccgtctaaaaaaaaaaaagttaaaactaaacaaagccaaaaatgagtgtgtaatttctgccaaatgtgtccaaattacatcaaacaagttcaaatggactattttcacagagaaaccataggcaatcgtctttttaaaagtgacccttatggggctgggcatggtggctcatgcctgtaatcctagcattcagggaggccaaggcaggtggatcacgaggtcaagagatcaagaccatcctggccaacttggtgaaacaccgtctctactaaaaatacaaaaattagctgggcttggtggcgcacacctgtagtcccagctacttgggaggctgaggcaggagaattgctcaaacccaggaggcagaggttacagtgagccgagatcgcactactgcactccagcctgagtgacactgtgagattctgtctcaaaaaaaaaaaaaaaaaaaaaaaaaattacctttctggtttgatgctacactttgaaaaaactgcttaacctttaaaaaggtatttgttttgccatcatctgatgcctggcaaaaaataaaaatagaaaacaaacaaacaaaaaaggtatttgtttctgacaggtagcagtaacaaaatgtggctaggctagaacaggtaactgaaagaaaattcaaaattgaggagtacataattaaaactagaaatttgatttataccataatagtccttttttttttgagggggacaggggagggatggagtttcactattgttgcccaggctggagtgcaatggtgcaacctcagctcactgcaatctccacctcccaggttcaagcaattctcctgtctcagcctccggagtagctgggattataggcacccgccaccatgcctggctaattttttgtatttttagtagagacggggtttcaccatgttggccagactgttctcaaactcctgacctcaggtgatctgccctccttggcctcccaaagtgctgggattataggcataagccaccgcgcctggcctataccataatagtctagcacaggcttttaaccaacatggatttccacgcccccaaaaataattgtttatttttctttagaacaaatgttttcttcagaaataaatgttgttttactcaccattttatctgttactctaaggtactgctgaatcctgattagaaaggtctaacatgggccatgcacagtggctcacatttgtaatcctagcattttgggaggccaaggtgggcgaactgcctgagctcaggaatttgataccaggctgagcaacatggtgaaaccccgtctctaaaatacaaaaaacataaaatactaaaatacaaaaaattagccaggcatggtggcacacgcctgtagtcccagctacttggaaggctgaggcacgagaatcgcttgaacctaaaggccagaggttacagtgagccaagatcatgactcttcactccagcctgggtgacagtgtgagactctgtctgcaaaaaaaaaaaaaagaaaagaaaaaaatagaaatgtctaacataagagaagaaacgaagagttaaaattaagttttggcacttaatcttcatttgtatggaaattttttttttttgaggtggagtctcgctctgtcacccaaggctgcagtgcagtggcatgatcttcattcactgcaacctccacctcctgggttcaagcgattctcctgcctcagcctccccagtagctgagattacaggtgtgcaccaccacacctggctaattttttgtatttttagtagagatggggttttaccatgttggccaggctggtctcgaacccctgacctcaaataatctgcccaactcggcctcccaaagtgctgagattacaggcatgagccactgcacctggcattattaatattatcactgttatttttagagatggggtctcgctatgttgcccagctggccttgaatcctgggctcaatctcttgagtagctgggacttcaggcgtgtgttgctatacccggcttgaattcctacaatacttctgaaagtaattccaatgatcttaacatttagattttttaaatgcataaatatttacagaatagtaagtataaggcaatgtaggtaaagtgtctgaaataagtctgaaataattatacccaggagaagtcatggtttttctgtatatgcaaaagtgaaaggacttattgaaaaactttttggaagttttagcataacttggcaccagaagtaggaacgataatttgaatgcacaaagagaactttaaatggttagtcttagcaatttgacctttagcatatccatccatccaaccaacaaatttctgttaattatctactgcatcctagttggtgggagaataaaagcaataggttagtttgacacagcgctgaaagtgctacaagagggcaagaggactgtaagctgtggaaggatataaaatgtgcccaaaccacagtcgggtgttaaggctttccagaattgaaacctgaaagataaataaaataaggcaacagaaaagaagagaaagtgagtgccaagcaaagggacagcttttaggaaggcctggagagaggatactttttacaaaccaaattcaaaatgttcactgtggctcaaaaagaaacagatgagactgacaagattggggcagccagatcacaaggtcttgtatgttaggaacttaagtcattttcaagagctttagaaagagcaactggccaggcacggtgcctcacatctgtattctcagcattttgagaagctgaagtgagaggaccacttgagcccaggaatttgagaaaaagccactaagggcttgtggaatgatctgatcagatttccattttggagagatgggcggtttataggttggccatactggaagcagaaaaatcagttatggactagtttcagttgtccattcatctattcagaaaaatttccctggcactttcaacgtgctagctactgggatatagtggtgaatgacaaacttccaggtctatggagtttgcattcagggtgagcgatattggtgtcctgtaccacagtagtataaatggatttagaaagtaatgagattccagcaatatttaaaagttgaaaacaaaagaaagcagcaatgggaatgaggaagagttagggatggtaacctgatttctggccaggtagatggtggtatccttcatgaagatagggaagaaaagagaaccaggtttgggaaataagttcagttttggacacgctgggagatattcacacccaataaacaatcataagatgaatctgaaactccagagagagatctggccttaaagtaggctatcagttccatgagagaaggaccttgtctgttttactcaccactgtatgcccaatgagcacagtatcatgcacatagttggcactcaatgaaagtatctgtaaggccaggcgtggtggcttacacctgtaattctagcactttgggagtccaaggtggacggatcacccaaggtcgcgagatcaagaccagtctgaccaacatgaagaaacaccatctctactaaaactacaaaattagccaggtgtggtggcgcttgcctgtaatcccagctactccagaggctgagacaggagaatcgcttgaacccgggaggtggaggtgatggcgaggcgagttcacaccattgcactccagcctgggtaacaagagcaaaacgccatctcaaaaataaataaataggccgggtgcggtggctcacgcctgtaatcccagcactttggaaggccgaggcgggcggatcacgaggtcaggagatcgagaccatcctggctaacacggtgaaaccccgtctctactaaaaatacaaaaaattagccgggcgtggtagcgggcgcctgtagtcccagctactcgggaggctgaggcaggagaatggcgtgaacctgggaggcggagcttgcagtgagccgagatcgcgccactgcactccagcctgggcgacagagcgagactccgtctcaaaaaaaaaaaaaattagctgggtgtggtggcaggcgcctgtagtcccagctactcgggaggctgaggcaggagaatggtgtgaactggggaggcagagcttgcagtgagccgagatcacgccactgcactccagcctaggcgactgagcgagactctgtctcaaaaataaatagataaataaataaataaataaataaaatctgttagatgagtaggttaaacattttgtaataatcaacaaatggtaaattgaacccctgggaatagaaattcttagaaagaaagcccaggagcacaacattcatctgagtaagaagaatccacagaatggtcacgtaggtaagaggaaagccaaggaatttcaaagtcaaacaaactaaatgtaatgtttctcaaaggaagaagtagccaaaaaacactgctgagacatcaagtatgagaaggaataagatagaaaacaagacaggcatttatgagagctaacttttctgaatgttcaagaataatgagtaggagacactctgaatatgtatctaaagtttcagatctaaataattatcttatgagatgaaatgaattatttgctgaaagagcagcttaaccttttcttcttcccttttcttccccagtagcttgaaaaaacacttaaagcttggccgggcgcagtggctcaagcctgtaatcccagcactttgggaggcgaggtgggcagatcacgaggtcaggagatcgaggccatcctggctaacacagtgaaacctcgtctctactaaaaatacaaaaaaattagctgggcatggtggcgggcgcctgtagtcccagctactcaggaggctgaggcaggagaatggcgtgaacccgggagatggagcttgcagtgagccgagattgcgccactgcactccagcctgggcgacagagcaggctgtctcaaaaaaaaagagaaaaagaaaaaacacttaaagcttaacctttattaacttgtttgttccatctaaagtgcctacctcttcactgctgcttgcttggttaaaaaaaataaaattatggccaggcgcagtggttcatgtctgtaataccagcactttgggaagcagaggcaggaggatcacttgaggccaggagttcaagtgcccatcctgggcaacacagcaagacccccatctctacacacacacacacacacacacacacacacacacacacacacacacacacactagctgggcatgatggcatacacctgtagtcctagctactcaggaggttgaggcaaaagaatcacttgaacccaggaattcgaggctgcagtgagctatgatcactccactgcacaccagcctgggtgacagagcaagaccgtgtctcaaaataaatagataaaataaaatttaaaaaaatttttaagtaaaataaagtacctgccactctagtctttatcccatcacatctatcacaatctgtaattaactggtttgcttattgtttattgcaatgtaaactccaagacaagataggctaccttccttgtctgtttcattagtggctacatccccagggcttagaacagtgccttgttctgccaggcgcggtggctcatgcctgtaatcccagcactttgggaggccaagggaggtgggtcactcaaggtcaggaattcaagaccagcctggccaacatggtgaaaccctgtctctaccaaaaatacaaaaattagccaggtgtggtggcaggtgcctgtaatcccagctgctcaggaagctagggtgggaaaatcacttgaacctgggaggcggaggttgcagtgatccaagatcaagccactgcactccagtctgggcaatagagcaagactctgtcttaatttttaaaaataaaaataaaaaagtccgggtgcagtggctcacgcctgtaatcctagcactttgggaggctgaagtgtgcagatcacaaggtcaggagttcaagaccagcctggctaatatggtgaaaccccgtctctactaaaaatacaaaaattagccaagcatggcggtgcacgcctgtagtcccagctacttggaaggctgaggcagaagaatcgcttgaacccgggaggcggaggttgcagcgagccaagatcccgccactgcactctagcctgggcaagagcgagtgctccatctcaaaaaaaaaaaaaaaagaaaaagaacagagcctggctcaataaatatttgttctttctaagcatctatgtttctgtttatctttccacctacttgggggaatgggataaggtagaactagagaatcataaagttcctgtccagctctttaaaagaaactgcaggaaggccggatgcagtggctcacacctgcaatcccagcaccttgggaggccaaggcggcagatcatttgaggccaggagtttgagaccagcctgggcaacatagtctgacccccatccctaccaaaaaaaattaattaatttaattaaaactgcaggaagaacaagagaaaacacactttaaagggcaataatagtcagacacggtggctcacgcctgtaatcccagcactttgggaggccaaggtgggcagatcacaaggttaggagtttgagaccagcctggccaatatggtaaaaccccatctctactaaaactacaaaaattagctgggcatggtggcacgcgcctatactctcagctactcgggaggctgaggcaggagaattgcttgaacccgggaggtggaggttgcagtgagccgagatcatgccattgcactccagcctgggcgacagcaagactccatcaaaaaaaaggttaaaaaaaaaaaaaaggcaataatagatgttgcatgtggctcacaactataatctcagttacttgggaggctaaggtagggggatagcttgagcccaggaggttgaggctacagtgagctctgattgcaacactgctctccagcctgggcaatagcatgagacactgtctcaaaaaaaaaaagggaggggggcagtaatagaatccagaatcataaaaattccaggcctataccccagaggaaatcttatcagcaggtaaaagaatttctcaggctctataaccctggcagagtaggtaaacaagtcagaaacaagatatcctggaaatacatgatttaagaaaaaaaaaaaaaaaagatggccatggggcggtggctggtgctggttatcccagcattttgggaggctgaggcaggcaggtcacctgaggttgcaagttcaagaccagcatggtcaacatggcaaaaccccgtctctactaaaaatacaaaaattagctgggtgtggtggcaggcacctgtagtcccagctactcagaaggctgaggcacaagaatcacttgaacccaggaggcagaggttgtggtgagatgaaattgcaccactacactccagcctaggtgacaaagcgaaagactgtctcaaaaaaaaaaaaaaaaaatagttactagcaaaaatattaaatatagggtcattttctgtatttctatatctcaaagtttcaaaaaggggaaaaataatttgttttctttttgagacagggtcttgctctgtcacccagagcaagtggtgctgtgtgccagagtgcagtggcacaatcaggggtcattgcaacctcaacctcctgggctcaagggatcctcccacctcagcgtctcaagtagctggagccacaggtgcataccaccacactcggctaatttttctattttttgtaaagatacggtctcactatgttgcccaggctgttctggaactctggggctcaagctatcctccttccttggcctcccaaactgctaagattataagcatgagccactgtgcctggtccataatagtttttatgtgataattttatttatttatttttatttttttttgagacaaaagtttcgctcttgttgcccaggctggagtgcaatggcatgatctcagctcactgcaacctccacctcccgggttcacatgattctcctgcctcagcctcctgggttcaagcgattctcctgcctcagcctcctgagtagctgggattacagacgtgcaccaccaagcccagctacttttatatttttagtagagacagggtttctccatgttggtcaggctggtctcgaactcctgacctcaggtgatccgcccgcctcagactccccaagtgctaagattacaggcatgagccaccacgcctggccaatgtgctaattttaaaacaaaattagccaattttaattccgttttatatatttcacatttaaatttctttttctttttcttttttcttttttgagatggagtcttgctctgtcgcctaggctggagtgccgtggcacgatctcagctcaccacaacctccacctcccaggttcaagtgattctcttgcttcagcctccggagtagctgggattacaggcacacaccaccatgcccagctaatttttgtatttttagtagagacggggtttcaccatgttggtcaggctggtctcgaactcttgacctcgtgatctgcccacctcggccttccaaagtgctgggattacaggcgtgagccactgcgtccggcctcaaatttaaatttcttatagaaaagtaactaaaatgcaaacacttcctcccagatgagtttcattaattcattataaacatattaagaagctagttagctatataataactgacacatactgtgctcttaaaaattaattcaaattaatattagatgatattacaaaggttcttttttttcttttcttttctttttgacagagtctcactgtgttgcccaggctggagcacagtggcatgaacacatcttacctcagccttgacttcctaggctggtgcgatcctcctgcctcggccccccaagtagctgggactataggcacacaccaccacaccacgctaatttttatattttttgtagagacaaggttttgctatgttacccaggctgatcttcaactcatgagctcaagtgttccgcccacctcagcctcccaaagtgctgggattacaggcattagctactacactcggccttggaaatgttctcaaacgtaaataatatggtggttatatggcagaatattctcattttttaggagataaatatgttaagtactgagaggcaaagtatcataatgtctgtaatttaaatatgttaagtactgaggggcaaagtatgtctgcaatttaaaatggttcagcaattaaatatgtgtatgtgtgtatatgtgtatccacacccacacatccacatatacagacagataaataaaacaacaactactgaatctatatagtgggtatacaaatgacaaatgtactttccatttttctatatgtttgaaagtttacctaataaaaagctgggaggggtggtggtggatttactgaaaaagtttactaaccttacaaaaaaaaaaaaaaaaccctagctggacgtggtggctcacgcttgtaatcccagcactttgggaggccgaggcaggcagatcacttgagctcacaaattcgagaccagcctgggcaacatggtgaaacccgtctttacaaaatatcaaaaattagctgggcgtggtggtgtacacctgtagtcccatctacttgggaggctgagacggaaggatggcttgagcccaagaggcaacagttgcagtgagccaagatcgcaccactgcactccaacctgggccagaccttgtctcgaaaaaaataacataaaataaaattctataccctcaacttggtacttctctattacattaatatataaattcccatggttcacctcacacatttttgggtgtgcctattatgccaaactactgaatgctgtaattcttaagaaaataaaacacagtatggccgggtgggtggctcatgcctgtaatcccaccactttgggaggccgaggcgggcagatcacgaggtcagattgagaccatcctggctaacgcagtgaaaccccatctctactaaaaatacaaaaaattagccgggtgtggtggcgggcgcctgtagtcccagctacacgggaggctgaggcaggagaatcgcttgaatccaggaggcggaggttgcagtgagccgagatcccgccactgcactccagccagggtgacagagcaagactccgtctcaaaaaaaaaaagaaaagaaaacacagtgctatgttcaaagcaataatcaaatatcactggtcaagatttcaaagtaaaaaacagaacttatatatacccatttccaaataacagctttttaaatatatataacattacatacattattaaactggtctatgcagatatttctgaccacaacctaataacttatttagataacagctgtattcattgagtgcagagcagagcaaaataacttgggtaggttctaacatcagttctcctgagaagcaaagttcagtacaacataagtaagcagcatgtagttaaaggtaaggtaaagatttcaagaagcaggaatcctgtactctctcaagcacagaactggatgtgtgacctatggcacacacttcagcaatccagtgaatagtcaatctactaatctaccctctgaaccagtttggtactatacccagtttggtgtcctcttttgtgatttttttttgttttgttttttcttttgaagacacagtctcactctgtagctcaggctggagttcaatggcaagatattggctcactacaacctccgcctcccaggtacaagtgattttccttcctctgcctccggagtagcttggattacaggcgtccgccaccatgcccagttaatttttgtatttttagtagagacggggtttcaccatgttggtcagggctggtcttgaactcctgacctcaggcaatccaccacctcggcctcccaaagtgctgaaattacaggcatgagccaccatgcgtagcgttcttttgtgatttttaactaaataaaaatatgagtgtcactacagcagggacacataatggtatctcatttagatattcacattcagaaatctcaaatttaaaaaaagatgtcttaatccagagctagtctttgtctttaaaaaaaaatgtcttaggagcttaagtaataattaactaacaaattattatttcataaagcaacaaccataccccttcccatcccactcccgccagaaaacaaacatagattgttcatttcagaaagtgtctgaatgactaggtgcaggggcatatctctatctactctggctaggggcagtgtgaacattattcgaatcgttaaccatggccaggtgtggtggctcacacctacaatcccaacactttgggaggctgaggtaagaaaatgtcttgaggccaggagttcaagacaagcctgggcaacacagtgtgaccccatctctacaaaaaaaaaaaaaaaaaaaaggccaggcgcagtggctcacacctgtaatcctagcactttgggaggctggggcaggcagatgacttgaggtcgagatcaagaccatcctggccaacatggtgaaaccccatctccactaaaaatacaaaaattagctgggtgtgatggcgcgcgcctgtagtcccagctactcaggaggctgaagcaagagaatcgcttgaacccaggtggtggaggttgcagcaagccaagacactccactgcactccagactggcgacagagccagactctgtctcaacaaaaaaaaaaaaaaaaaaaaaaaaaaaactttggcaggatccacaaggcaggaggatccacttgagcccaggagttccagaccagactgggcaacatagtgagttcagcttgcataacataacgagaccctgtttctacaaaaaaaattaaaaattagccaggcatggtggcgcatgcctgtagtcacagctgctcagaggctgaggaagtgggatctacttgagccctggaggtcaaggctgctgtgggccatgattgcacaactgcactccagcctgaacctcatctctaaaaaaaagaaaaaaaaaaaaacccaaccaaaggaaaaaaaaatcacaaaaacaaacagttcagaaaaaaaaaatggtatttttaaaaatatgaaaaaatgttggccgctgccgggcgtggtggctcacacccataatcccagcactttgggaggccgaggccggcggatcacctgaggttgggagttcgagaccagcctgaccaacatggagaaaccccatctttactacaaatacaaaattagctggccatggtggcacatgcctgtaatcccagctactcaggaggctgaggcaggagaatcctttgtatctgggaggcggaggttgcagtgagctgagatcgcaccattgcgctccagcctgggcaacaagtgtgaaatgccatatcaaaaaaaaaaaaaaaaaagaaagaaaagaaaaagcaaataggttggccgggcacagtgtctcacacctgtaatcccagcactttgggaggccaaggcaggtggatcacctgaggttaggagttcaataccagcctggacaacatggtaaaaccccatctctattaaaaatacaaaagttagcgaggtgtggttgtgagcacctgtagtcccagctactcaggaggatgaggcaggagaactgcttgaacccgggaggcagaggttgcagtgagccaagatcgcgctactgcactccagcatgggtggcaaagcaagaccccatctcaaaaaaaaaaaaaacaacaacaacaaaagaaaataggttgggtgcagtggctcacacctgtaatcacagcactttgggaggctgaggtgcgaggaatgtctgagcccaaatattcaagatcagcctgggcaacatgggaaacccatttctacaaaaaatacaaaaattagccaggcatggcggcatgatcctgtagtcccagctattccggaagttgagatgggaggatcgcttgaacccaggaggcagaggttgcagtcagccgggattacaccactgcactctggcctgggcaacagagtgagatctcgtctcaatcaatcaatcaaaagatctataaaaatattaaaatatgtgttttttaggccaggtgcggtggctcacgcttgtaatcccagcactttgggaggccgaggcagggggatcacctgaggtcaagagtttgagaccagcctggacaacatggtgaaaccccttctctattaaaactacaaaaattagccgggcgtgctggcgcgtgcctgtaatcccaaactactagggaggctgaggcaggagaattgcttgaacctggaaggtgggagttacagtgatctgagatcgcaccactgcactccagcctgggcgacagcacaagactctgtctcaaaaataaattttttaaaaaatgggccaggcatggtggctcatgcctgtaatcccaacactttggcaggccaaggtaggcagataacaaggtcaggagttcaagaccagcctggctaacatggtgaaaccccatctctactaaaaatacaaaaagtagctgggcatggtggctcatgcctataatcccagctactcagaaggctgagacagaagaactgcttgaatccagaaggcagaggttgcagtaagccaagatcgtgcctctgcaccccagcctgggcaacagagcgtgaaactcagtctcaaaaataaataaaattaaaaaataaaatatcaagtgtgggccaagtgtggtggctcacgcctgtaatcccagcactttgggaggttgaggcagatgaatcacttgaggtcaggagttttacaccaccctggccaacatggtgaaaccctgtctctactgaaaatacaaaaattagccgggtgtagtggtgcacacctgtaatcccagctactcaggcagctgaggcaggagaattgcttgaacctgggaggcagaggttgcaatgagctgggatagtgccactgcactccagcctgggtgacagagtgagactctgtctcaaaaaaaaaaaaaattatgaatgaatgagaacactaaaacaagaacaatgaatgtcaatacctattttcctgcccatgagtcttacgggtcccatgttcatacacttccaaagacaagaagtgtcaaaagtctccatttaaacaaaaatcattttgttactgctttaagtgctgattccatgggaacaagttagaaaattctcagtagtgtctctcacctctgcattcagtcatcctattgttttgttttttggtaagaaacagggtcttgccctgttgtcaaggctggagtgccgtggccatgataactcactgcagtctcaaactcctgggcttaagtgatcctcctgccttagcctcctgagtagctaggactacaggctcacaccatcacacccaactaattttttttatggtttttggggaagaggggtctcactacgttgcccaggcttgaactcatccttttttttttttttttaaagcaaaaggccacaaaaaagcagacacaaaatcacataatccattcccagtaaagatattctctcttcagtccattctctgcatgtatgagtctatctcaaaaaggagggaaggagccaggcgcggtggttcacagtggcaatcccagcactttaggaggccaaggcgggcggatcacctgaggtcaggagttcaagaccagcctgaccaacatgcagaaaccccaactccactaaaaatacaaaattagccaggcgtggtggcgcatgcctgtaatcccagctacttgagaggctgaggcaggagaactgtttgaacccaggaggcgaaggttgcagtgagccgagatggcaccattgcactctagcctgggcaacaagagaaactccatctcaaaaaaaaagaaaagaaaagaaaagaaaagaaaaagaaaaggaaggaagacaatgcctcttcgtttttatgtgtaatctccctctactgaatgatgctaaatgagctctcactttgagaataacagtgataacataaaagacccacagaatcactaagaactaaattcctaaaggttctttaaactcgtatgtctacttttcagaagtttcttttttttttcttttttcttttttgagaggtagtctcactctactgcccaggctggagtacagaggcacgatcccagctcactgcaacctccatctcccgggttcaagcaattcttctgcatcagcctccccagtagctgggattacaggcacccaccaccacacccagataatttttgtatttttagtacagacagggtttcatcatgttggcgaggctggtcccacactcctgacctcaagtgatccatctgcctcggcctcccaaagtgctgggactatagatgtgagccaccacacctggcccttttttaaaagttacagcaaatcatgcctgttttaaaagaatcagaagttgcagaaaaaccctaacatacccagttataacctctctctccagatcattttgtatccagatttttattttaaaaaatcactgggctggggcacagtggctcacccctgtaagtcccaacactttggcaggatccacaaggcaggaggatcacttgagcccaggagttccagaccagactgggcaacacagtgagaccttgtctctgtaaaaaatttaattagcccagtgtggtaacgcatgtctgtggtcctagctactcaggaggctgaggcaagaggatcacttgagcccaagagattgaggctgcagtgaactgtgactgtgccactacaccccagcctaggcgattgagactctgtctccaaaaagaatttaaatttaaaagtcactgattttaaaataaattattcaataggttcacagggcttattctggatagagtcaacaggatgttctggctgaaaaagtgaaattgaaacagagtagaaagtgaggagctagctatgtaaaattctaaggagagcattctagagcatgggcaaaggcatcagacgggtcttggttaaagaatggagaggtgtgtcacaggcagcccaaaggagagagtgatgggcgataagatgacagatttcttgattagcatctgaaaccggtccaaatctatctaaaattagcccttctttaggttgtttttaaagaatccctaaaacagcagactagctccacactagaaattcaaataaaagcaaaggaaaaagtcagaaggtattcaaaatatgtcctatcaatataaagattaaatttttgatgccttgctgagaattcctgcaagcaagagatcatagcacctcacacattcctaaaacattctatctacatacccacctaagtttccacagaggtgctcagaatttactttactctctctggtgatggataatttccatgctttcaaatcacttttgctgtaaataccctgaggcacttactttggtataaaagactcttggtctccgcattaaagacacaaacaggccggcacggtggctcatgcctgtaatcccagcactttgggaggctgaggcgggcagatcacgaggtcaggagattgagactatcctggctaaaatggtgaaaccccgtctctaccaaaaatacaaaaaaattagccaggcgtggtggcacgtgcttgtaatcccagctactcaagaggctgaggcagaatcgcttgaacccgggaggcggaggctgcagtgagtcaagattgtgccactgcactccagcctgggtgacagagcaagactccgtctcaaaaaaaaaaaaaaaaaaaaaaaaggcgcaaacaaagcactcacagaaaactaaacacagaattcactctacatattggccaaagggagacaatttctggatactgagcaacacacaatttatgatcttatgtgaaaactgatggccgggtgtggtggctcacatctgtaatcccagtactttgggaggctgaggcgagtggattgcctgagctcaggagttcaagaccagcctgggcaacaaggtgaaaccccgtctctactaaaatacaaaatatatatacatattagctgggcggggtggcacgtgcctatagtcccagctactcgggcggctgaggcagaagaattgcttgaacccgggaggcagtgagccgagatcgtgccactgcactccagcctggcgacagagagagactctgtctcaaaaaaaaaaaaaaagagaaaagaaaactgataacaaggtgtgtttatgtttgtggcctgggagtgggctcatttagcatttcataaatgttctctgttctcaggtcatgaccctttgcccaatggtttcactatggagaatttacagatgtaactgaaaaaatataaactacaaataaattcattggataacctattttttttagagtcatttactcaagaaattaatagggaacccagagtctagcagtcgggcaattttgttttctgattctgcaacctgtggcagatggttttcttggcacgtgtgaccctggcattttgcccatatttacacggactgacaggagtttaaggctggagggagcatttattttacgtgaggtaaaaggtcatgtcaggcttgcttgtcacctgtgtgtacatgtggttaattcccagtcacttccatgtatatccacacactggcaaggggctatatgagcatgaagcagcaagtagcacttgacctctgttctataaagagtgctaacaaacaagcggaaattgtgatcctatcattatttggtttttcatcccttccttccctatatgaaaggaaaagctcttgaaatagtccattctggcggggtgcggtggctcatgcctgtaatcccagcactgggatggtcagcccgaggccaaagtgggcagatcacttgaggccaggagttcaagaccatcctaggcaccatggagaaatcctgtctctacaaaaaacaaaaatgagcggggagtgttgtcctagctccttaggaagctgaggcacaagaatcgcttgaacccggcaggcagaggttgcagtgagccaagatcactccactgcacttcaccctgggcgacagagtgagactacgtctcaaaaaaaaaaaaaaaaaaaggcaattttgtttggcaaattcaatagcattcctttgagaaaattggatcccacaatcagaactaaaaatcatcactacagtcaagcttttaaaaaaggaaaaagaactatttaaccagatgcaaaggtatacgtgacaaaataaaacaaaaatttaatggtgttactattcagtgtcaggaaatgagctacaaacctcacatcctaaaaactcttcaagtctttttgaaaaatactatgtcattccttcaataattagttatttcgcctcctttgatcaccatgtatttaagcaggtgtgctaggtgcttgagaaacaaaaataggacacatcacctgcctttgataaggtccacagaaataacgccaacgcaggctgaaagctaaactccttgtcagtctcaagaagccaaggacctatcacttgcaccctagaactccaaaaggttcacagagtcgaggtgagggcgcccaggtcactgctcgggtgctagagttaacaggtggccaaatgcacgtataaacagcagtctaagaaggaaactcagacggaaaaagtgttgccaactgtcacctacatcttcccaaccccgccccccaatcctttttataaataaacggagggtttttgaagggaactgtccaaggttacaacctgatacggaggaatgctttggtttgggataccaacgaaattgtttatatatttattgagtactgccacacaacatctaaaagttgacaaagtgtcaaccaaggcacatagaacataaaataagacgtctttctcaacaagattaaaacgtcaagaagaaactgaccgaaagagggagatctctaacttcccaaagcaaggcaaccccctggaaaggtactggaactagcggaagttacatatccagggcagaagtgtccccctccccaagggtaaaactttgaaccgccatctgactatcccacggtggtcggaaacttccctcaacaagaagcaaccagacacccaacaatctccgcccttggccaaccccaggtgtcctcaggccaggctgccgcttcctccccgggccctgcctcctccatctcgctcccttcccaggacactcagtagccggcctcggcttccaacgccggcctggctcccggggtacctggaggccgccgggatcggtcccagggggcatcggcctcaggcccgccctccaggaggcccgtcgcgcctctagtccccgaccgggccgcgaccccgccccggccgcccccggagacggatcccgcggcccccgccctgccgccggcctcacctcctcagcgtgcttgcgcagcgccttctcccgctcgtactgggtgatgagctgctcgttgtcgtcccgcagcagctccagctccacctggtgctcctggtcctgcgcgaacaccgagtccaggttctccagcacagccaccaccagcggcatcagctctttgaccacctcctcgtcatagcgcccgataagccgctcgaactcgcggtagatggagccggccaggccggacacccgctccgacatcacggccccggagccgccgggctcctcctgatacaccacaccgtcctccagctccatggtggcaagcggacgggcgggcggcccggggcgtcgccggcagaggggcggcacctgcccgcacgggacggacccgactcgggctgggacgggtactagggctggagcccgggccggggctggggctgggcccggcggggtgggggccggggccggaggaggggaggggtggcgtaggcgctctcaccccaaccgccgctgcaccaactgccggggcggcccggccgcgcgcgccacacgtcatccgcggggcggggccggcgccgcgtcggcccgatgggcggggcgccgcgggaggccaggcgcggccgggggcggggccaagcgtcttcgggcgctggcggaggaagccatggcgtcaacacccggcgccgcgaagacggtgcgggcgccaatgggaaagactgcggtcggcgggtggggagaagtatccatccacagcgggattcgcggggcgggtcccaggggaaagggaggggttcgggaagagtgacgagttaacttagctggcatttctatggctttttaaagctcacaaagcacctactcacttcatccccacaacaggcgtaaagaggtagatatttggacctcgtttcacagacaaagaaactaggcccaggaaagtggcgttgctctcaaggtcacgcagctacaacgggaaacgggctgagccgggactcaaaccaattacccagattgagaattccgggctccgaaaaaaactggaaacagaaagggagggaaaaaaaaccataaccagggtctgcccaagtggaaaggtggtctcgaatagaatagaactgttttgtgctatggaagagcaagggtgagatgaggggaaatgggagtgactgctaataggtatgggatttcgttttgggataataaaaatgttctaaaaaatgtattatagtgatgaatacacaactctaaatatgctaaaagacattcaactttacacgttaagtgagtgaatcatatggcgtgtgaattatatctcaagttattaaaaaataaacaggaagggtgatagcattctggagaagggtgaaactggaacgttacatgtggcactttcccacatagtgtgtctgctacttctggccaacttgggacggggacatttccaggctccagccaccctcctctcctcaagtcttgaagtggggcggaaagggtaagtgggaggttggggaacagaggaggtaaggggtggagtcactggagtgaataagtcccatgacaagtgaggtttctgccgcctgggagagtgtcacgtgtggggaatgacacaacgcccacgcctagagcgggctgagtcaaggatcccggtgtgctcatctaacgtccgcaaatgggacggaagacactctcaaaagtcccttctctgtgtctcaggtgactcagctctccgtcccgactcgtttaagaaaagggggaggaaaggcaggataaacataggtttaaggggagaattggccacccaccgggatcataactacccttagcttggggtttacaagtttaagtacttcccaccaagtatgaagtagtcccctaaagtttcctacgcatgacccacctggagacccataaaaacaatatgaaggttgggcaagagtaaacctataaatttggaaggacaaagatgaaaatactaagtcttatgaagtgccagatgggactgaatttgcggcctgtgttttttcccgttctcaccctcaccccacattcacccttatgtcatttagatatttgggtagtaggaatgccgaccagctggttggctgtgagccgcaaatgccctttctcttcttaacctttcatatttgaaaactagaaaaagtcttgatctgaatctctcctcttttattttctcttcctgagggctgtcactcacctggtctacctatatgcatgcctctcttttcctgggggatcagaagagccaaaaaacatagggcaaggctttactttttctttccacaatattatcatacacatcaaaaaatttaaagaaaaaagtatcagccgggcgtggtgactcatgcctgtaacccagcactttgggaggccgaggcgggtggatcacaaggtcaggagttcaagaccagcctgaacaatatggtgaaaccccatttctactaaaaagtacaaaaattagtcgggcatggtggtgcacacctataatcccagctactcaagaggctgaggcaggagaatagcttgaacctgggaggcggaggttgcagtgagcagagatcacaccattgcactccagcctgggcgacagagtgagactccatctcaaaaaaaaaaagaaaaaagaaaaaagtatcgatttttcaagtacgagattttaattgtcattcctaataagtatacttctttaggtatacgttcaacatagaaagatacacacttatgtcttgattttaagcttctgccagttatcagagataacatttagttaaaataaaattcagctaaataaccatcagctgatgaatggataaaatgtgacataggtatacaatggactattatttggcaataaaaagaaagtcgttggaggggaggggagtaggcgtggtggctcgcgcctgtaatctcagcacttgcaagaggatggcttgtgccatgagttggagaccagcctgggcaacatagtgagaccttcatccctgacaaaaaaaaaaaaaaaaattttttttggccaggcacggtggcttacacctgtactcccagcactttgggaggtcgaggcgggcggatcacctgaggtcagaggtcagatgttcaagatcagcctgaccaatatggagaaaccctgtatctactaaaaatacaaaattagccgggcgtggtggcccgcacctgtattcttagctactcaggaggctgaggcaggagaatcgcttgaacctgggaggcggaggttgtggtgagccaagatcgagccattgcactccagcctgggcaacaagagcaaaactccgtctccaaaaaaaaaaaaaaagaatagaaaagaaaacaaaaattttaagtacatgccatgacatagctgaatcttttttttttttttgagatggaatttcgctcttgttgcctaagctggagtgcaatggtgcaacctcagctcaccgaaacctccgcctcccaagttcaagcgattctcctgcctcagcctcccgagtagctgggattacaggtgtgcgccaccacacccggctaattttttgtatttttagtagaaacagggtttcactacgttagccaggctgatctcaaactcctgacctcaggtgatccacccaccttggcctcccaaagtgctgggattacaggcgtgagccaccatgcccagagatacagctgaatcttgaaaaagctaagtgaaagaagtcagtcacaaaggaccacatattgtacaattccattcgtatgaaatgtgaatttagtgattggctaggtctcaggggcatgagagggtgagatgaggggaaatgggagtgcctgctaataggtatggggtttctttttaggataatgaaaatgttctaaaaattgattataatggtgaatacacaactctgaaaatatgctaaaagacattcaactttacacattaaatgagtgaatcatatggtatgtgaattatatctcaagctattaaaaaaatatatgaagtaaaagttatggctggtggggcgtggtggctcatgcctgtaatcccagcactttggaaggccaaggcgagcagatcacttgaggtcaggagttcgagaccagctggccaacatggtgaaaccccatctctactaaaaatacaaaaattagccgggcatggtggcgtgcacctgtaatcccagctactcgggaggctgaggcaggagaatcgcttgaactgggaggcagaggttgtagtgagctgagatcatgccattgcactccagcctgggcgatagaccgagactccatctcaaataaatacataaataaataaaatttatggctataatgatttttatagtagacccaatgaaagcacatcactcagtatgattgaggtgaaagaaactggtgttgaaattaggaaccttgtattctagtatggactggtcattttgaacaacttaggccataaacaaaagagcaagtagttactgattacccacttagtgacagtcacaaggataagggctgtaaacttcagcttattcatccgtatgatgaaggggtttgttagaaaatctgtcccagcactttgggaggctgaggtgggaggatcagttgagggtaggagtttgagagaagcctgggcaacatagccagagcatttctgaaaataaaaataaaaaataaagcccaggttgtgctgatgcaggcctgtagtcccagctactacttggggagctaagctataaggatcactggagcccaggaggttgaggctgcaatgagctgtgatggcacaactgcactccagcctgggcaacagagcaataccacaactccataaagaaagaaagaaagaggaagagagtgagagaaaaaaaaaagaaagaaagggaaagagggaaagagaaagaaagaaagaaaaaaagagaaagaaaaaaagaaagaaagaaagaaagaaaaaagaaaaatctgtaaaggcattttttcgttgttttgttttttgagatgaagtctctctcttgtcctccaggctggagtgcaatggcatgatcttggctcactgcaacctctgcctcccaggttcaagtgattctcctgccttggcctcccgagtagctgggattacaggcgcctgccaccatgcccggctaatttttatatttttagtagagacaggttttcactttgttgtccaggctggtctcaaactcctgatctcaggtgacctgcccacctcggcatcccagagtgctgggattacaggcgtgagtcaccatacctagctcccccccgcccccgccttttttttttttttttttgagatggagtctcactctgtcgccaggctggagtgcagtggtgcgatctcagctcactgcaacctctgcctcccaggttcaaacgattctcctgcctcagcctcccaagtagctgggattgcagatatgtgccaccacgcccagctaatttttgtatttttagtatagatggggtttcaccatgttacaggccagaatggtctcgatctcctgacctcgtgatccactgacctggacctcccaaagtgctggaattacaggcatgagccaccgcgcctggcctgtaaagggtttttgcagttctaaaatcctatgattctcttgtataataggttgtaatgacagacaggagacagggtcttgatattgagtcccgttagtgaactccttcttatgtaggcagtactactacctcctatattcaattggctggatagattcccaacttccacccctgacccacaatgagagtatcattaactaagagttgttaaggaaaaataggtcatcttgtggactttagagtaaagtgtttacttttgattcctacagggaaggaaattccatttcaagagattccttggccttgcaaaaatagtgaggacagtcacgggggcagcagaggggagcagttaatgagagcaggaagggaggagtttcttcctaagcataataactataatcactggaaggctgaaattactagtcctgttgtttgtccagccttctggaacatatatagttatttctatgtgaatcaatttctctagtttcacaaatgacattttcccacctgcaaggagagagtcactgaaaaaggaagagaagatggggttccccgggcacaaggccctctggtcatggcagtgtgaaatgataagtaattcatcactgggtacaaactaacatatgtttggtgaggcagtctagctatggaattccaggctcagaatgaaaagcaccagggtatttttctgagtcctcagtttttcctttgaaagccttttttttttgagacggagtctcgctctgtcacccaggctggagtgcagtggcgcaatctcagctcactgcaacctctgccttcctggttcaagcaattcccctgcctcagcctcccgagtagctgggactacaggtgcacgccaccacacccagctaattttttttgtatttttactagagatggggtttcaccatgttggccagactcatcacaaactcctgacctcaggcaatctgccccccttggcctcttaaagtgttgggattacaggcgtgagccactgccctcagttttttttttttttttttttttttttttgagacagtctcactctgtcacccaggctggagtgcagtggcaagatctcagctcagtgcaagctccacctcccaggttcaggcgattctcatgccttagcctcctgagtagctgggattacaggtgcatgccaccacacccagctaatttttatatttttagtagacacagggttctgtcatgttggccaggctggtctcgaactccaagcctcaagtgatccactggcctcggcctcccaaagtgctgggattacaggcgtgatccaccatgcctggccaaagcctttctttttttttttttttttaagagacagggtctcactctgtcactgaagctggagcacagtggcacgatcgctgctcactgcagccttgacctcccaggctcaagggatctttccacctcagcctactaactacaaatacgccaccaccccggctaatttatttttttactttttatcgagacaaggtctggctctgttgctctggctggtctcaaactcctgggctcaagtgatcctcccacctcagcctcccaaagtgctgggattacaggagtgagccactatgtctgtccttgaaagcctttttaatgtgccaaaacaagatgggtaaatgtatccaggttgaagttagaaggcctctagacaataactattctgttttactccctgttccccaagagctttggattcactggaattgcctctaagaagaggctgtacacatggttgaagcaggaatcccagtattgaggctgtttttgatggggccaaggaatgtcggtcatatttgtgtgcaggtctattttctctctccactttttctgacttgggctgagtggatgaagaggaggcccaccaccacctctcagtatactttgtacacatagagttgcattcatctgggaataaaagacatattttcaaaacagtaggtttgatacaggacaggcaagctcccaaattggggcttagccagggagggttgttggcttcctccaggaaagaattcaagagcaagctggtggtattaaacagcaacttgtattgaagtggcagtgtatagcagcagcagaggtactgttcctagcgagcagggataccccatagtcggtgtgcccagaatagcatctcagaggcagttctgcactcatatttttacccacttataatcacatgcaaaatagggggcagtttatgcagacatttctaggaaaagggttgtaacttctgggttgttgggtcattgccatggaaatgggtggtaacttctgggtgttgccatggcaatggtaaactgacagggcacgctggtgggtgtgtcttatagaaaactgcttctgccttggggcttttttaagctagtcctcagtttggtccagtgtccaacctctgcctctggagtccagtccctgcctcctacctcaggttgcttgggtttttccctcccaattatacaagaaatgcatactcactatagaaaatttgctaaatatgagccaggcacggtggctcacgcctgtaatcccagcactttgggaggctgaggcaggcggatcacgaagtcaagaactcaagaccatcctggccaacatggtgaaaccctgtctctattagaaatacaaaaattagctggggatggtggcgcacgcccatagtcccagctactcagaaggctgaggcaggagaattgcttgaatctgggaggcagaggttgcagtgagccaagatcgcaccactgcattccagcctggcgacagagcaagactccgtctcaaaaaaaaaaaaaagagagagagaagaaaatttgctaaatatggccaggcgcggtggctcacacctgtaatcccagcattttgggaggctgaggcgggaggatcacgaggtcaggtcaagaccagcctgtccaacatggtgaaaccccgtctctactaaaaatacaaaaatgagctgggcatggtggcaggcacctgtaatccctgctactcgggaggcggaggcaggggaattgcttgaacccgggaggcagaggttgcagtgagctgaaaccacgccactgcattccagtctgggcaacagagcaagactccatctcaaaaaaaaaaaaaaaagaagaagaagaaaatttgctaaatataggccggccgtggtagctcatgcctgtgatcccagcactttggaaggccaaggtgagtggatcatttgaggccaggagttcaagaccagcctgaccaacatggtgaaacccagtatctactagaagtacaaaaaaatagctgggcatggtggcagacacctgtgatctcagctactcaggaagctgaggcaggagaatcacttgaacccaggaggcagaggttgcggtgagctaagatcgtgccactgcactccagcctgggtgacagagcgagactctgcctcaaaaaaagaaaaagtatgggagtggaatatggcttctgttacttgatcaaggtggataaagatttatggagactttggattcatatagtgacctttgctctctgtcttctggtctcaaaacaatgttccttgttttcttggtctctgaatatccaactggccttgagagttgtagctgtgagctactagaactcagaatccattcttttcgcattgttccctgtataacttggccacctttgactctaatgctacccaagtcatctctgaagtgtggctgtgatggtagccttcactgcaaccctttcctcagagccacctgctgtctaccacccaccctaccccagcatccaggctagggtggggaaagataaacctctgagccttccatggcctgatcccacagcacagccagtttgatacgcttgttttttagattggtatggggtggtcttcagggcagcatctttctgaaccccaaatgagaagagggtagggccctcaggattactttccattatccagcccatctcctactctctgggatgaaacctggacttccaaaaatgtgggcacatatctgacagttttattctcttcattcctgttgtcttttttttttgagttggagttttgctctgttgccaagctggagtgcagtggcacaatctcagctcactgcaacctctgcctccgcctcctgggttcaagtgattctcctgcctcagactcccaagtagctgggactacaggtgcccgccaccacacccagttaattttttgtatttttggtagagatggggtttcaccatgttggccaggatggtctcgatctcttggcctcatgatccacctgcctcagcctctcaaagtgctgggattacaggcgtgagccactgcgcctagcccgttcctgtttttttgcttccgtctcgccaatcttccagactaaaaagtgagaccagttgtggtggcttatgcctatagtttcagcatttgggaagctgaggtgggaggattgcttgaggcctggcatttgaggttgcagtgagctatgattgtgccactgcactttatcctgggtgacagaacaagaccctctctcaaaaacaaacaaaccacaacaacaaagctgtggttggtgctagtcttggtgcatatgtttaagctgatcttacttagatctttctgtttgcattcaatctctgtctgtctagtcttcatagatgcctccccatcctctatgctaatgtgtatttttttttttttcccgagatggagccttgctctgtcacccaggctggagtgcagtggctcaatcttggctcgctgcaacctccgcttcccaggttcaagcaattttctcccctcagcctcccaagtagctgggattacaggtggctgccaccacaccctgctaatttttgtatttttagtagagacggggtttcaccatattggccaggcgggtctcgaactcctgaccttggaatccacgcccccgccacccgccccccatcagcctcccaaagtgctgggattacaggtgtgagccaccgtgcctggcccctctatgctaatattaatataatggcaatggtttgggtatgagaaacatttgacaaatctaatgaacagaacttggtagttttagagggtgatagagaggggactcacagatttctggtttgagtaaatgggtaaatggtggtcccagcaatcaaaatagctaattcaggaaggaaagcagcttttgaaaataaaacagtgaattcattttggactcctttggtttgagatacttctggattgaatctcaaaaaataatggtggctgtacaaatcttttaaagtcattaatttataaatgtagtaaagtcttatttgtaaataatactcctaggaagaattattttgtgaaacacatcatccaacatttaccctttttatttttatttttttgagacgggatctcactctgtcatctaggctaactccagtgcactcccagtggcactatcataccttattgcaaacttgaactcctggcctcaattgatcctcctgccttagcctcccaaagtgctggaattacaggtgtgaaccaccatagctggcccaatatttacccatgatatatattttttgtatttttttgtagacacgggggtctcatcatgttgcccaggctggtctcaaactcctgggcttaagtgatctgcctgcctcggcctctcaaaggagataggctgggcgcagtagttcacacctgctgggactacaggtgtgagccactgcacctggcctaccctttatattttctttagtcaactgtttctaccaaatagctatttgaaatatcctcccctaagggaatgcaaattttgctgggtaagggaaagaaacctgagctaattttgggatttatatcactacttcttaggaaagcaaatttggggagaaaaatgaagattaagaaagaacttggggccgggcgcagtggctcacgcctgtaatccagcactttgggaggccaaggcggacggattgcctgaggtcaggagttggagactcagcctggccaacataatgaaaccctgtctctactaaaaatacaaaaattagccaggtgtggtggcacgtgcctgtagtcccagatactcaggaggctgaggtgggagaatttcttgaacccaggaggcggaggttgcagtgagctgagaccacgccattgcactccagcctgggtgacagaatgagactccgtcagaaaggaaagggaaagggaaagcgaaaggggagggagagggagggaaagaaagaaagaaagaactttagtgtttttcttcccaacctttcctcccattttattgctgaggaaattagggcctaaagggttaaaggctttgagcagcaagcaaaatgagggcactggccctggggagaggagagtggaaaaaggaggttcaagaaggtgagaaataatccccaaaagctgaatagaaaaactaccctaaaacaaaaccctaggatgagtcctgttccaataagactttactaccttaaacgaataccaggaacttgtccccaagttgccccatcaccagggggatgaccaactgttccaaagaaaccatgtatatgaaatcactttgcaagctgcaaagtccagttaccagtgttgctaacatcaaccattattcctcaaaaacataaaaaacccaggtctaggctgggcacggtggctcacgcctgtaatcccagcactttgggagggcgaggtaggtgggtcacccgaggtcaggagtttgagaccagcctgaccaacatggcgaagccctgtctctactaaaaatacaaaaatgagctgggcgtagtggcacacacctgtaatcacagctacttgggagcctgaggcaggagaatcgcttgaatccaggaggtggaggttgcagtgagccaagatcatgccactgcactccagcctgtgtaatggagcgagactccgtctaaaaaaaaacaaatagaaaacaaaacaaaaaaatcccaggtctaaggacaagttcaatccacaagcagagaacaggatatgaacaaactggaacacaataacatgctgtggaatatatgttctatttaaggtctacagcttatctgaaatacaacagaaaaagaggggctggttgggaacaaggggtggtgtctggtcagaaaggaaataatccatagatcccctgtgacctttgtcacttttttcctccacatattcatgtatgaaaatgactcagccctaacaccctgtggtttatttttagtaggggcaacagagccagttgaaaacctaagcatagtaactattgcccatcaacagcctcacacatcagaagcagggaacaaatatttattcatttcaactaatatgtgtgactcaaggggcacaagagagtctgcccctttcaagatatatatttgctctttctttctttctgccacagtattggaacctcccaatgggagaatgactcctttggacttgaaatttcagtatgaggagacccgtagccagcagtgagtggagtccatttcactcattttataactgaggaatcatccacagtcacatgtaagtttgtggctatgttggactctcagcccagtgcctcattgtatctccattgttccacattccttagtcaaaagctaaataatagcacatgtttgacacgagaccatagttccagaagaagaggacatattcagggctgatatcccattataatgtaagttaaatgttgaatataaggagataacattctgttgttcactatgaaattagtagacatcaagacccatagggatatattcttttttttgttttgagacagagtttcgctcttgttgcccaggctagagtgcaatggcgtgatctcggctcactgcaacctccacctcctgggttcaagcaattcttctgcttcagcctcccaagtagctggattataggcatatgccaccacactcagctaattttgtatttttagtagagatggggtttcaccacgttggtcaggctggtctcgaactcctgacctcaggtgatctgccagtctcggcctcgcaaattgctgggactacagccatgagccaccgcaccccgcctctttttttctttttttttcagatggagtcttgctctgtcatccaggctagaatgcagtggcacgatctcggctcactgcaacctctgcttgtgttcaagcaattctcctgcctcagcctcccgagtagctgggattacaggtgtgtgccaccacacccagctaattgtatttttaatagagacagggtttcactatgttggccaggctggtcttgaactcctgacctcaggtgatccatcccccccttggcctcccaaagtactgggattacaggtgtgagccaccatgcccagccccagagggatgtattctttactgttttgttaaaattcaaaatcttcatcaagcatcagcaacaaacaagaacaactgagagtgcaaggatctggggttagctgcggagtctgaactgtgcttctgccacttactagctgtgaagttactcttttatttttatttttattttgagacagagtcttgctctatcgcccaggctggagtgcagtggcatgatcttgactcactgcaaactccgccttccgggttcacgccattctcctgcctcagcctcctgagagctgggactacaggcgcccaccaccacgcctggctaatttttttgtatttttagtagagacggggtttcactgtgttagccaggatggtctcgatctcctgatctcgtgatccgcccacctcggcctcccaaagtgctgggattacaggcgtgagccatcgtgcctggcctgaagttactctttctacctgttttctgacctgtaaaatgaggttgagaaaaacagtacctatctcatagggtttttgtgaaggttaaatgagataatatacacacagcacttagaatagtgcctggcatataaatattcaataaatgtgatgtgatttcgctctgtgtccccacccaaatctcattttatagctcccataattcccacgtgttttagggggaacctggcgggagataattgaatcacaggggcaggtctttcccatgctgttttcatgatagtgaataagtctcatgagatctaatggttttaaaaaatggagtttttgcctggtgcggtggctcatgtctgtaatcccagcactttgggaggccaaggtgggcggatcacctgaggtcaggagttcgagaccagcctggccaacctggtgaaaccctgtctctactaaaaatacaaaaattagctgggcatggttgcaggcacctgtaatcccagctacttgggaggctgaggcaggagaatcgcttgaacctgggaggtggaggttgcagtgagacaacatcgcgccattacactccagcctgggcaacaagagcgagacttcattccaaaaaaataaaacggagttttcagccaggctcagtggctcacgcctgtaatcccagcactttgggacgctgaggcaggtggatcacctgaggtcaggagttcaagactagcctggccaatctggtgaaactctgtctctactaaaaatacattttgtatttttagtagctatagtcccagctacttcggaggctgaggcaggagaatcgcttgaactcaggaggtggaggttgcagtgagccaagatcacgccactgcactccagcctgggtgacagagtgagactcaagtctcaaaaacaaaacaaaacaaaacaaaacggagtttccctgcacaagctctctcttctcttgtctgctgccatgtaagatgtgcttttcaccttctgccatgattatgaggcctcctcagccacgtggaactgtgtcagcattgtgaaaatggactaatacaaaatgtaagctatgatcttcccaggcttgtcttgaactcctgagctcaagcaagccttcctcctcagcctcctgagtagctgagacgtgccatcaagcccagctaattttttcattttttctgtagagacgggatctcattatgttgcccaggctggctggaactgctgacctcaagtgatcctcctgccttggcctgtaatcccaaagtgctaggattacaggtgtgagccaccatgcctggcctgcatgttactgtttcaaaagcacactcagcatatctgtagcaggctttccagtctcttagaaggatgccatatttgctttttaagtgttaatgccagctgacttttatcccttgaaaactacagtagccaggtatttttgaggaaagtgtccttgttggagaggggacttgaagtcttgagataagaagaaagtttgaagtcattggacacgatcatgctattgaagagcagcctgtgacattagtgagctgtcttcaaatagcgtgtcatatagagagacagctagagggaggatgataaccaaagctttcaagacatgcattttttctcaatgtaagaactttaggctgggcgcagtggcttatgcctgtaatcccagcacgttgggaggctgaggcaggcagatcacttgaggtcaggaatttgagaccagcttggtcaatatggtgaaaccccatctctactacaaatacaaaaattagctaggcgtggtggcacgggcctgttgtcccagctacttgggaggctgaggcaggagaatggcttaaacccgggaggcagaggttgcaatgagccgagatcccgccactacactccagtctggatgacagagcgagactcgtctcaaacaaacaaacaaacaaacaacaaaaaaaaacatgccggatgcggtggctcacacctgtaatcccagcactttgggaggccaaggtgggccgatcatgaggtcaggagttcaagaccagcctgaccaacgtggtgaaaccccatctctactaaaaatacaaaaattagccaggcgtggtggtgcacgcctgtaatcccagctactcaggaggctgaggcaggagaatcgcttgaacctgagaagtggtggttgcagtgggtgagatcacgccactggcactccagcctgggcgacagagcaagactctgtctcaaaaaaaataaaataaaaaataaaagaacttaaaaaatatcagtgggagttgtccaaaaatggttagggggatcttgggaaatagtggagtctccaccactgcagttttcacacctgacttggacagcatatggcagggatgtggtcaagagaaacaaaacatgggagttggaataggtaaggattttgtttgtttgttttgttgttgttgttgagatggagttttgctgttgttgcccaggctggagtgcaatggcgccatctcggctcactgcaacctgcactccctgggttcaagcgatcctcctgcctcagcctcccgagtagctgggattacaggtgcgcacctccatgcccaagtaattttgtatttttagtagagacgggatttcaccatgttggccagactggtcttgaactcctgacctcaggtaatctgcccacctcggcctcccaaagtgctgggattacaggcatgagccaccgtgcccagctggaataggtgcgttttaagatcctgttcaccagatcttaaaatgtttaggtcggcaaaatttgcttttgaagccaactatttccctcttctactcctttttctaattctgatattctacccccatggcctccattccccaagacctaaggattgcttgttccatgagttacccaaagtctcaaatgcagtacttcccaccaacctatcagctacccctcccctgcttttctgtacccaacttttagtgtacagattccaatcggttgttaaagaaaaaaaaaatggctcccttaactaattcttactatgacataaacgactaacactttatgtgttctcttctcagggatacacaccgtttaaaggaattgctcatttgctagttgtatgtttgatataattacaaacatataaaaatcaagactggaaagaagtatgcaaacaatgacagtttttaggttgggagaattaatttttctttcttttgagtttcttggccaggaatggtagctcatggctgtaatcccagcactttgggaggccaaggtgggtggatcacctgaggttgggagtttgagaccagcctgaccaacatggagtaaccccatctctactaaaaatacaaaattagctgggtgtggtggcgcatgcctgtaatcccagctacttgggtggctgaggcaggagaattgcttgaaccagggaggcggaggttgcagtgaggcgagattgggccattgccctccagcctgggcaacaaaagcaaaactctgtctcaaaaaaaaaaaaaaaaagaagtttccttaaatcaggagtgtccaatcttttggcttccctgggctacattaaaagaagaattgtcttgggccacacatcaaatacactgacactgaccaggtgcggtggctcacacctataatcccagcactttgggaggtcgaggaaggcagatcatttgaggtcaggagtttgaggccagcctggccaatatggcaaaaccctgtctctactaaaaagaaaatacaaaaatttgctgggtgctgtggcatctgcctatagtcccagctactggggaggctgaggcatgagaattgcttgagcctgggaggtggaaattgtagggagccaagattgcatcactgcactccaggctgggagacagtgagactgtctcaaaaaaacaaaagaaaacactaatgatagctgatgagctaaaaaaaaaaaatcacaaaaaacctcacaatgttttaagaaagtttacgaatttctgttaggctgcattcaaagttgccctgggctgtgggttggacaaacttgcttaaagtatgtttaatcttatagtgtgtttaattaaaaacaaaagcacaacattaataatcatttggactagtgtataaactgtggaagaggaaggcccttttctgccagagttatgtggccttttccctttatgtctgacctgtattaaactgtctaaggcagcctgggcgacatagtgagaacttgtctctactaaaaatttttaaaaaataataataaaataaaattagccaagtgtggtggcctgcgcctgtagtcatagctacttgagaggctaagataggaggatcacttgagcctgggaggtcaaggctgcagtgagccatgattgcaccactgccctccagcctgggagacagtatgagatcctgttacaaaataataataataaactgtcctagggagatagcacaccaggaatgactcttggacctggcttccagaggatttgttcaaacctgcttttatcccttcagtgtttcttccatctctctttcttcaccctacttcacagaaagagtgtttcttgctcttagtaaccaattggctgggagcaatggctcatgcctgtaatcctgggactttgggaggccaaggtgggaggatcatttcaggccaggagttcaacaccagcctgggtaacatagtgagatcccatctctatataaaaccattttttttttttggctggaccaggtggctcatgcctgtaatcccagcactttgggaggccaaggttggcagatcacttgaggttaggagttcaagacaaccctggccatcatggagaaaccccgtctctactaaaaatacaaaagttaggcaggcgggttggtgggtgcctgtaatcccagctacttggaaggctgaggcaggtgaatcgcttgaacctgggagccggagtttgcagtgagcagagatcgcaccattgcactccagcctgggcaataagagtgaaactccatctcaaaaaaaaaaaatttttttttcaaaagctccaactatagaaaattcaggagtcttttcagaccactgtcagctaggtaactcctgataaatgacaagtttcaaagttaggcatggagaagagggagaaaatatttcaactgtaaggcatgtaagttaaagagctgtgacagtcatctggcaggttaaaacactccaaagaacaagaattggattaagctataattagtgcatttagaggtagaaggttaaagcccaaagtacaagtgtatggtcagggactagactgggaaaggaagagataagatcatagtgtttcagaaacagatcagaaagctgagaaaagggaaaaaaaaatagaaaaaaaaagattgcagtgtgtttggcggggcacaatggctcccatggtgtaatcccagcactttgggaggccaaggagggtggatcacttgaggccaggagtttaagaccagtgtggccaacatgtcaaaaccccatctctactaaaaatacaaaaattgctgggcatggtggttcacacctgtaatcccaaacactagggaggctgaggcaggagaatcgcttgaacctgggaggcagaggttgtagtgagccgagttcacaccactgcactccagcctgggtgacagagtgagactctgtctttaaaaaaaaaaagaaaagaaaaaatagtccaggcacggtggctcacacctgtaatcccagcactttgggaggccaaggcgggtgaatcacctgaggtcaggagttcgagaccagcctggccaagatggcgaaaccccgtctctactacaaatacaaaaataaaaaaatcctcccgggcatggtggcacttgcctgtaatcccagctactgggggtgctgaggcaggagaatcgattgaacctgggaggcagagggaggattgcttgaacctgggaggcagaggtttcagtgagccaagatcgtgccactgcactccagcctaggcgacagagcgagactccatctcaaaaacaacaacaataaaaaaaaataataaagattgcaatgtctgatatatttgttttgttggtgttttttttgttttgttttgtttgttatgtttttgagacagagtcttgctctgtcacccaggctggagtgcagtggcgtgatctcagctcactgcaacatccacctcccaggttcaagcgatcctcctgccttagtctcctgagtagctgggattacaggtgtgcaccaccacgcccagcaatttttgtatttttatttttattttatttatttacttattatttatttatttatttatttttgagatggagtcttgctctatcacaaggctggagtgcagtggcatgatctcagctcactgcaacctctgcctcccaggttcaagcgactgccctgcctcagcctcccaagcagctgggattacaggcatgtgccaccacacccagctaattttttgtactttagtagagacggggtttcaccatgttggccaagatggtctagatctcctgacctcgtgaaccgcccgcctcaacctcccaaagtgctgagatttcaggcgtgagccagcgcacccggcctattttattatttttattatttttgagacagagttttgctctgttgcccaggctggagtgcaatggctctatcttggctcactgcaacttccacctcccgggttcaagcgattcccttgcttcagcctcccgagtagctgggactacaggcgcatgccaccatgcccagctaaattttgtatttttagtagaaatggggtttcactgtgttggccaggctggtctcgaactcctgacctcgtcatccacccgccttggcctcccaaagtgctgggattacaggtgtgagccaccgtgcccaaccaatttttgtagttttagtagagaaagggtttcaccatgtaggtcaggctggtctcaaactccggacctcaggtgatccacctgccttggcctcccaaagagctgggattacaggcgctaaccacggtgcccggccagtgtgtgatatattagtgagaaaaaggcaaagacatctctggctcacagaaagccaagtgttcccgcatatttcctaaatcctttagctttaggcagagccatttgactagtttggtcaatgggctggaagtgataggtgtcacctctaggccaaaccaaccatttaataggtattgtgtgatcctccagctttctttactccgcggtgatacacttaggccttgtactgagatggcagagctacattttggaaaggttcttagagtcgctgcagaggtcaggtaactgaagagatgctggcccttgattttaggtgaatgagaaagtttggttctgttaaaccactgagacatgggatgtctcgttgcagcataacctcgttgcggcataacctggcgtatcctgataaatacaaaaaggcacttcaacaatagtattgtagccgggcttgcagtggtttacacttgtaatcccaacattttgggaggcttaggcgggcggattgcttgaggccatgagttcaagaccagcgtgggcaacatggtgtaaccctgtctctactaaaaatacaaaaaattagccgggcatggtggtgcatgcctgtaatcccagctactcaggaggctgatgtatgagaaacgcttgaacctgggaggcgtagaatgcagtgagctgagattgcggcaccgcactccaacctgggcaacacagcgatatttcatctgaaaaaacaaaaacaaaaacaaaaatagtattctagagattatagattacatgatattcagctccaaactagacaggctgaagggacgaagaagacctggagccagtcaagaatcaccattggtaaagacaaaatatatagggcctctgtcaaagactcccaatagggtctagggtcaaaccacatgaaagcaagaagattaatgctaaatcactaccctgaatgttgagcctcttcatctacataatcctttcccccagagaggtttagcctaaaagactgtaccagggtcaaagtaagtggagagactgttacaggaaaagagcctgtggttttgctaaaggctttattgtacctagtctcagaacatggaaacaagaagaaggttataggagaatataaaaataagtggagagatggtcaaggagcttaaggagaaaaggtcgatggtattagaatcattgttgataagagcagaaaatgaaaggctttcaaagcaaggtagtatagttcaatagaaggaaaaacatgactgatataatttggtttggattgtgaccattaaggtttcatcataccaggaaagtctatgatttctgaggacatcatagcctatggtacacagtatggtggttaagaatgtgagctctgagccgggtgcggtggctcaagcctgtaatcccagcactttgggaggccaaggcaggcagatcgcctgaagttgggagttcgagaccagcctgaccaacatagagaaaccccgtctctactaagaatacaaaatttgccgagtgtggtggcgggcgcctgtaatcccagctactcgggaggctgaggcaggagatcacttgaacctgggaggcggaggttgcagagagccgagatctcgccattgcactccagcctgggcaacaagagtgaaactcggccaaaaaaaaaaaaaaaaaaaaaagaatgtgaactctgggctgggcctggtggctcatgcctgtattcccaacaggttgggaggctgaggcaggaggattgctttagctcaggagtgtgggaccaacatagtgagaacccatctctacaaaaaacaaaaccaaaccattagctgggtatggtggcacacacctgtggtcccaggtacttgagtggctaaggtgagaggattctttgatcccaggagctcaaggctgcagtgaaccaaaattgcaccactgcactccggcctgggtgacagatcaagatcctatctaaaaaataaaaaaaagaatgtgacctctggagcaagagtaagatgggttcataaccaggctctgccacttattagttttgtggccttgggcaggttatttaaccttccggtgctcagttttcccatctgtaaaacagaaataagaatagtgcctgcccctcatgcctgtaatctcagcactttgggaggccgaggcaggcagatcacaaggtcaggagatcgagagcatcctggctaacatggtgaaaccctgtctctactaaaaatacaaaaaaatgagccgggtgtggtaggaggcgcctatagtcccagctactcaggaggctgaggcaggagaatggtgtgaacccgggaggccacacctttcattttctgctcttatcaacaatgattctaataccatcgacctttctccttaagctccttgaccatctctccacttatttttatattctcctataaccttcttcttgtttccatgttctgagattaggtacaataaagcctttagcaaaaccacaggctctttgcctgtaacagtctctccacttactttgaccctggtacagtcttttaggctaaactgccggaaagacagtgagccgagatcgcgccaaaaaaaaaaaaaaaaagaatagtgcctgcctcatatggttgtagaaccagactatgtgagtagtccctcatgactaccttccccaatcagcaaataatgcacatttccctaaaaactctcttcctccctccctcaggaatcagggcctcagaagcattgaggaggtagtttacctatgcatattccagagcaagaagcagacagatgacctatgtgtgggttttgtaaagcacaggcaattaccctcaccaaatgatcctgctgtttgatttgttggttgactctggagtcaaaggtgggagggctcgtacttcattcttgattataagcagtgaagattccctgggggctcattctcaattggtgttatgaatgttctctctttgccctgcatcccaagatgtttttctcttctcacacacaggcataatgcattagttgttctgattccttaaatcattaataacagggagtcatgtcctgaatcaattccattctttgtacagtattagagctagccgtcttgttggtctcaagttgcatttaaaaacaattatgttggccgggtgtagtggctcacacttgtaattctagcactttggcaggctgaggcaggaagatcccttgagtccaggagttcgagaccagcctgggcaacagggagaccctgtctctatgtaataataaaaaaaaacaaaaaacaattatgttatttccttgtctctcctttatttgcaccccatctcactgaatggtagtgagacccaagaataaagccttgtgcatcatgatgcagcacacacatggttaagggcctgggttctggcactgtgcagactgggctgggcatggtgactcatgcctgtaatcccagcactttaggaggctgaggcaggcgaatcatgaggtcaggagttcgagaccagcctggccaacatggtgagaccccgactctattaaaaatacaaaaaatggctgggcacagtggctcacgcctgtaatcccagcactttgggaggccgaggcaggcggatcacaaggtcaggagattgagaccatcctggttaacatggtgaaaccccgtctctactaaaaatataaaaaattagccgggcgtggcggcgggcacctgtagtcccagctactccggaggctgaggcaggagaatggcgtcaacccgggaggtggagcttgcagtgagctgagatcacgccactgcactccagcctgggtgacagagtgagactccgtctcaaaaaaaaaaaaaaagaaaaaaaatacaaaaaattagctgggcatagaggtgagcacctgtgctcctagctactcagaaggctgaggcaggagaatcgcttgaacccaggaggcagaggttgcagggagccgaggtcgcgctactacactccagcctgagtgacagagtgagactccctctcaaaacaaaacaaaacaaaacaaaacaaaaaaattggctgggcatggtggctcacgcctgtaatcccagcactttgggaagccgaggcggacggatcacttgaggtcaggagatggataccagcctggtcaacatggtgaaaccttgtctctactaaaaatacaaaaattagccaggcttggtggtgtgcgcctataatccctgctactcgggaggctgaggcaggagaattgcttgaacctgggaggcagaggttgcagtgagccaaaatcatgccactggactctatcctgggtgacacagagggactgtctcacaaaaaaaaaaaaaaaaaaaaaaaaaatcagcctggcttggtagtgtgtgtacctgtagtcccagctactagagagactgaggtgggaggatcgtttgagtctgggaggtcagggctgtagtgagccgagattgcgccactgcactccaacctcagcaacagagagagagacactgtgtgcgcaaaacacacacacacacacacacacacacacacacacacaaccctggttctacctctttgagctctctgcacttgagcaagttactctgtctccatgagtctgcttcctcacataaaaaaaatgagggtaattgttgtgtttactcacagagtagttgtgcagtttaaacaaattaattcaggcaaggtactttgtgcctggcacagagcaatctttcaatcactgttggctattatcaatttttgtgtaacaaatgaatggtaattatcaccccttctaaatactttttagacctatagatcacctttatgcagaaaattcccacttctctcctcaaggataacatctcttctgaaccccagataaatgtcttccattgattactgcacactttctctctgtatcatcctccatcattcacattacatcaaactcagtcttctgactggctcctttggtcttccctatttctcttaatgctatttttgtttatagctttttagaggtaattttgtcactcaaaactatttaaaaaaaccctgaacaaacagttgacatttattatttactgtgtgccagacaccatgttaaatctttattggattacttatatataattctcacaacaattttttgatgcaggggctattactacctccatttagcaactctagcaactctagaaactgatgcttacagatagttaaatgacttgtcgaaggtcatgtaactattcataataagtgactcagccaagagttacacccacatgttttgaaaacagacccatgctcttaagcactatcatggttatgctgtagtttctctctattgcttgtttttgtttgtttgttcgttttgcttttttgagtcagagtcttgctctgttgcccaggctggagtgcagtggtgtgatctcggctcactgcaacctctgtctcccaggttcaagcaattcttggcctcagcctcatgagtagctgggattacaggtgcccaccaccacgcccagctattttttgtatttttagtagagacggggtttcaccatgttggccaggctgatctcaaactcctgacctcaagtgatcttcccgccttggcctcctaagtgctgggattacaggtgtgagccaccatgaccagccctaattattgattatgtcaacaacttcctattaggtttctttgcttccagcctctccctgtccaatttatcccccagactgtagctagattctccatggtctaaaacatagcctccccatataccactgtaatcttttttctttcttttttccattaatttttttttttgtattttttgtagacatggggtttaaccatgttgcccaggctggtctggaattccagagctcaggcaatccgccctccttggcctcccaaagtgctggggattacaggtatgagtcactgccccagtataatcttaaataaatgggtcatttcttttagtctgtttctctgtaaagtgagctaatttttgtatttttagtagagatggggtttccccattttggtcagactgatcttgagctcctgacctcgtgctctgcctgccttggcctcccaaagtactgggattacaggcgtgagccactgcgcccagccttcaatagttttattaagtcctagaatgttaagatgtttctcatgtcactgtcctatttccagactttaatggcttcccattaaccacagttcagggtctatacttcttagcattcaaagattgtcactctggtggttttaccccttccgaaccataggattctgattccctgtgtgatctccttatgaatacagccatgccttttccccatctctttaattttaattttttttttttgacatggagtcttgttctgtcacccaggctggagagcagtggcgcgatcttggctcactgcaagctccgtctcccgggttcatgccgttctcctgcctcagcctcctgagtagctgggactacaggcacccgccacgacgcccggctactttttgtattttttttagtagagacgggtttcaccgtgttagctaggttggtctcgatctcctgaccttgtgatccacccaccttggcctctcaaagtgctgggattacaggcgtgaaccacctggcccggccccattttaatatttttttgggacgggtcttgttctgtcacccaggctggagtgcgatggtgcgatcatggctcactgcagcctcgaaatcctgggctcaactgatcctcacgcttcagcctcctctgagcagcttggcctacaggcatgtgccaccatgcccagctaattaaaaacattttctttctctttttggagtggcagtattgttaccagaaaggggtcctgatccagatcccaagagagggttctttggcctcgtgcaagaaataatttgaggcaggaaaaaaaaaattcaaggtgaatccataaagtggaagcaagtttattaagaaagtaaaggactaggccgggtgccatgcctcatgcctgtaatcccagcactttgggaggctgaggtgggtggatcacgaggtcaggacatcgagaccatcctggctaatatggtgaaaccccatctctactaaaaacacaaaaattagctgggcgtggtggcgggtgcctgtaatgccagctactcgggaggctgaggcagagaactgcttgaacctggaaggtagaggttgcagtgagccgagatcccgccactgcactccagcctggcaacaaagggagactccgtctgaaaaaaaaaaaaaaaaaaaaagtaaaggaataaaagaatgtctactctacaggcagaggggttatttcttgattatatgctaaacaagggtggattgtttgtgagttttctgggaaagggatgggcaatttcccctctcccccagttgagtgctcctcccctttgtagaccatatagggtaacttctggttgtttccatggcatctgtaaactgtcatggtgctgatgggagtgtcttttagcatgtgaatccattatagttagcatataatgagcagtgagggtgaccagaggtcacttttgttgccatcttggttttggtgggatttgaccggcttctttaccactgtttgatcaccaaggtctttgtaatctgtgtctcatgttgatctttttttttttttttgaggcggaggtttgttctgttgctcaggctggagtgcagtggtgcgatctcagctcgctgcaacctctaccttctgggttcaaacaattctgcctcagcctcccaagtacctgggactacaggcgcgcgccaccacgccgggctaatttttgtatttttagtagagacagagtttcaccacgttggccaggctggtctcgaactcctgatctcaggtaatccacccacctcagcctcccaaagtgctgggattacaggcatgagccaccgtgcccagcccttgtgtcgatcttctatctcatcctgtgactaagaatggctagcctcctgggaatgcagcccagtaggtctaagcctctttttacccagcccctatttaagatggagttgctctggttcgaaagcctctgacagtatcttattatactgtgtaggctggtcttgagctcctggcttcaagagatcctcttgcctcagcctcccaaagtggtgggattacaggtgagagccaccatacctggccctttccctcatctctaattcctggcaaccactaaactagtctatcctctatgtctatacttttgttattaatatttcacaaatgttaaatgcaataatacaatagataactttttatgtttggcttttcttcagtcagcataattcccttgaaatctatccaagggaattatgtatattgcatgtattaatagtttgttatttttttctattgttgagtagcattccacagtatggatgtagcatagtttgtttaaccattcacatgatgaaagacatttgggttgtttccagtttttggttattacaaataaagctgcaatgaacatttgcgcacaggtttttgtgtgaacagagcataagttttcattcctgttggataaacgcccaacagtgcaatggctgggtcatatggtaagcacatgtttagttttttaagaaactatcggccgggcgcggtggctcacgcctgtaatcccagcactttgggaggccgagacgggcggatcacgaggtcaggagatcgagaccatcctggctaacacggtgaaaccccgtctctactaaaaatacaaaaattagccgggcatggtagcgcgcccctgtagtcccagctacacgggaggctgaggcaggagaatggcgtgaacccgggaggcggagcttgcagtgagtcgagatcgcgccactgcactccagcctgggcgacagagcgaaactccgtctcaaaaaaaaaaaaaaaaaaaaaaaaagaaactatcaaactttttcagagtggctgtacaattttatattcctaccagtaatgtggatccagtttctatacctccttaatagcgtttggtgtatcactactttcattttagcattctgataggcatgtagtaatatccgattttggttttagtttgaatttccctggtggctaatgatgttgaacatcttttcatgtgctttcttgcctctgtatatcctgttcaatgaaatgtctattcatgtcttttgcccattttctaattggatttttttaacctgttgagcgttcagagttcttcaaatattcaaaccttcaaatgaagagaaggcctttatctgatatgtggtttggaaatatttccttccactctagcttgttttttcgtcctcttcaaaaggtctttcacaggacaaaggttttaaatttcttttctgcagggcacagtggctcacgcctataatcccagcactctgtgaggccaaggtgggcggatcacctgaggtcaggagtttgagaccagcctggccaacatggtgaaaccccgtctctactaaaaatacaaaaattagccgggcgtggtggtgcacgcctgtagtcccagctactcgggaggctgaggcaggagaatcacttgaacgtgggaggcagaggttgcagtgagctgagatccgccaaggcactccagcctgggtgacagagcaagactgcatctcaataaataaataaacaaataaataaataaaggccgagcacggtggctcatgcctgtaatccctgcactttggtaggccgaggcagatggaacacttgaggtcaggagttcgataccagcctggccagcatagtgaaaacccgtctctactaaaaatacaaaaattagggccaggcgcggtggctcatgcctgtaatctcagcactttgggaggctgaggcgggcggatcacgaggtcaagagtttgagaccaacctggccaacatggtgaaaccccgtctctcctaaaaatacaaaaagtagccgggtgtggtggtgggcacctgtaatcccagctgctcgggaggctggggcaggagattcgcttgaacccgggaggcggaggttgcagtgagccgagatcgcaccactgcactccaccctgggcgacctggcaaggctccgtctcaaaaaaaaaaaaaaaaaaagaaaaagaaaataccgggcgtggtggcagacgcctgtagtcccagctacgcgggaagctgagtcacgagaatcgcttgaacccggatggcggagtttgcaatgaaccgacatcgtgcaactgcgctccggcctgggcgccaaagcgatactcggtctcaaaaagaaaaaaaagaaaacaggagaataatgaaattttacttatttattttatttattttttatttttttgagaccgagtctcgctctgtcacccaggctggagtgccctggcgcaatctcggctcactgcaacctctgcctcccgggttcaagcgattctcctgcctcagcctcccgagtagctgggactacaggcgcctgcaaccacgcccggctcatttttgtatgtttagtagagacggggtttcactatgttgcccgggctggtctcgaattcctgagctcaagtgatcctcccgccgctgctttccagcgtgctgggattacaggcgtgagccaccgcgctcggccaaaagttttaaatttcagtaagttccaatttatcaactttttccctgtatagattggtcttttggtgtcgtctaaaaactatttgcctggccctaggtcctgaggattttttttaactttttttttccccataagtgatttattgttttacatttaaatctatgattcattttgagtaaattttgtataaggtgagaggtttaggttgaggttctttgggtctatattcgtccaattgctccagcatcatttgttgaaacggctcctgattccatttttgtacctttcccccgttcatttccccttagagcagtgggaatgtttttttgttagtgatgatgtcatgccttgtgcaaaatctgtattagcatctcacaacataagatttggctctattctaacggcattttccaccactcgatgtccaccgtaatacttggctctcgaagaatcactgggctggctccctcacttcatgcaggtctattctattatcacttactcagagatttctctggccttttcttcacagcacttacaaaatgcgatctattacatattaatttgcttatttgcttcttgttttcctatactcccatccctcccagaagctccaagagagcatactgttttatccctagggcctagaataatgcgtccacgtagtaggtactcaaaattttttgcttgacaggctagaaaaggtgaataaacacaaagcgggagcgaaaagtctacttctaggtcaggcactctttggacttcacgcaacgtgtgagcgccacctctcgggaagccaatttgctcgcgaacgaaggaagtgagtcagagaacccgggggtggagagaagaaagcaagcagctaaccggaaaggtctgaaaaagctagcgccggaagttaaactgcagaaagttgttccctagaatgactgcctactcccaagaggaagcgtgggcgagcggtgttctgcaaaatgggctctccggcagcggatctgcgcagaagcgttccgtgcgtgcaagtgctgcgaaccacgtgggtcccgggcgcgtttcgggtgctggcggctgcagccggagttcaaacctaagcagctggaagggtaagaggtgttcgggatcctgagaggaaaaagaaaggagtgtagtcgcgggagtgggttaggtgaggagttagtgaagagatgagttcagctctaagaggcggcgaggaggatcggatgggaggaggggcagggagcgcctgtggacaagtgcagaccggtcggcgcacgtcccacgccacgtggactcgcctttgtcggtggccgcctttctcgtcaggccgcgacgacagggctgtgccttatttgtgtctgtcgagagcagtgccgggcacggagttggcgctctgtaagtgcttgctgaataaatgacgggtgtgtgtgtcattcattcagcaagcactgagtgcttactgttgtgtcaccgggaccgatgtggagggacatttttagggtgtatttctggcgctttagtcctgttttctcctggacaatttatgcttgccccgcaccccatcgtgcgattctccgcagtctttgggctttgtctctctctctttttttttttttggaagttgcagaatggtgataaatgattttctttgctcctattgactgctaggccctgtggctaggtaccatagagtctctacacaggactaagtcagcctggtgtgcaggggaggcagacacacaaacagaaaattggactacagtgctaagatgctgtaagaagaggttaactaaaggacaggaagatggggccaagagatggtgctactgtctactttagggatcgtctttcaaggcgaggggcctcctatctcaagctgtgatacagggtaggtcatgagcgcagtcttctgtaaaatgagggatctggacggaatagttactctctaggcttcctttcagtatgatgtcccgtatcagatattcctaatgtctgtagttctcccacaccccaccgtttattggctagtcaaaatattctttgcattgtaaagtgtagcataacattacaagaatggattaatgggttgggaatgctgggttttggccttcattctggtgctgtggtcctgtttcctcatttgtaaaatgaagggggttgtaaagatatattctctaaaacccctaatgctatggctgtggcattaagtcaaactattatttcttactgctttgtaccggacatcactttcacattagtaaaacttttcatcagtgtagtttctcccaagcttgattattgagaaagatagtgccttgtttttaacatcctgtatcctagttccaccgcagtgtttggtacacagtagatgtttaaaagaagcttattaaatcaaatggtggccaggctcatggggctcacgcctttaatcccagcactttgggaggctgaggtgggcagattacttgaggtcaggagttggagaccagcctggccaacatggtgaaaccccatctctagtaaaaaaaaatacagaaattagctgggtgtggtggcacgcacctgtagtcccagctatttaggaggttgaggtaggagaattgcttgcctgggaagtggaggttgcagtgagccaaggtcgcaccactgcactccatcctgggcgaaagagcaagactccataccaaaaaaaaaaaaaaaaatcaaatggggctgggtgtggtggctcatggccataatcccagcactttggtaggctgaggtgggcagatcacttgaggacaagagttcgagaccagcgtgggcaacatagcgaaaccccatctctaaaaaaaccccacaaaaaccaaaacaaatgaaaataaaataaatcaaatgggatagaaattatagtccttgcttttggatcctttcccacattgacatattagttcatagatcaggggactggggaggaattgggtttttaccagagggagacctggagctgacctgacagatttaaaccagctttatgggataatccgcttgagacggatgacgctgtaggcaagtgattcactgctgtttcattcctctacctgcctatccccagaaccatggccaactgtgagcgtaccttcattgcgatcaaaccagatggggtccagcggggtcttgtgggagagattatcaagcgttttgagcagaaaggattccgccttgttggtctgaaattcatgcaagtaagtggacttcattgttcccattttgattccttcatagtataggagaacactgtgattaacctgtttctccccgtctttcttatttaaagttctccacggtagagtgaacacaagtgtcttgagacctggaaactcctcagtgccctagcgtttggctacatcttggaacaaaccaagttatttaggattttccaaaatagtctctgtaataggaggtgcattgctacgggaaaagcagtgcagagttccacatatgactgcatctctgtaatttctgactgagagctgagcatgtttgagttcttggtcttgagcttcctgagcagataattttagagagatttttttccccctttgagacaggttgttttttagcaagaaagtctttccatcatcaattactagacactaataaatgcttattgtttagcatatattaggtatcataggagctggtggaggaaaactatggttttggttttggggaggttcttcagaaacagcagagagcagatgtacctgcaagctacttacaaagcaatcttttgataaatgcaaaggattgattgaccaataacccttcttcaaacaaattctagagataatccaaattctcggctgggtgaggcatagtggctcatacctgtaatcccagcactttgggaagccaaggcaggctggtcacttgaggtcaggagttcaagaccagcctggccaacattgtgaaaccccgtctctactaaaaatacaaaaattagctgggcatcagggtgggtgcctgtaatcccagctattcggcaggctgagacataagaattgcttgaaccagccaggtgcggtggctcatacctgtaatcctagcattttgggaggctgaggcgggcggatcacctgaggtcaggagttcgagacagcctgaccaatatgatgaaaccccgtctctactaaaaatacaaaaattagccaggcgtggtggcatgcgcctgtaatcccagctactcgggaggctgagacaggagaatcgcttgaactggggaggtggaggttgcagtgaccgagatcgcatcattgcactccagcctgtgcaacaagagcaaaactccatctccaaaaaaaaaaaaaaaaaagaattgcttttgaacccaggaggcggaggtttcagtgagccgatattgcaccacactgcagcctgggcaacagagggagggagactctgtctcaaaaaaaaaaaaagaattccaattctcaaatcaaataggggatagtatgttttctaaaagggaatcaattttggacccttctagtgcattttaaaatttagtttgacttgcaatttacttcctatgtgatattttagaaaaactgctttagggctggcacagtgactcgcctgtcatcccagcactttgggaggctccgtctccaaaaaaaaagaaaaaaaagaaaagaaaaactgctttaatgtaaaagagggtagactgatgttcatgctgagaggagaatatggtgtccaaggtcaaggagctggcatctaatgaaggttttcttgctgtatcatcccatgacagaatggaatagcaagagagtgcaagagtgagagagagcaagagggggctgatgttgattttataacaaacccactcctgagataagacattaatctgttcatgagggtgaagccctcatgacctaaacacctcccattaggcctcacctcccaacattgttgcatcgaggattaaatttccaacatacgaactttgggggacacattcagatcacagcagaaggtaacatgagatggatgtgttgttgatcaggcatttaccatatgctgggcacatatgttttctgatttagtcttcatgccagccttgagaagtacttactcctgttctcgtggttgttagtgatgagcaacctaaggcttggagaggttcagtgatgtgcctgatagcatacagtgatgccactggaattttaacttgagtctctctgacccctgagtgcagatactttctcctttacattgaatttcctattaaggatatatgggtttggtgaagaatggacggaaggatagctgccatgactctaaaggggcatttaaatctggtgtggaggcaggaagcaagggagaacttgaggttcccaacccccaagcccttaaaaaaagcccgtgatctgttttgcagactaaagataatcagttagggcctggcgtggtggctcacacctgtaatcccagcattttgggaggtcaaggtgggtggatcatctgaggtcaggagatggagaccagcctggccaacgtggtgaaaccccgtctctactaaaaatacaaaatttagctgggtgtgatggcgcatgcctgtagtcccagctaccagggaggctgaggcgagaggatggcttgaactcgggaggtggaggttgcagtgagcggagatcgagccactgcactccagcctgggtaacagagcaagaccctgtctcaaaaaaagataattagccgggtgtagtggtgcacacctgtagtcctagctactgagaatctgaggcaagaggattgcttgagcctgggagtttgaggccgcagtgagctatgatcatgccattgcactccagcctgggtgacagaaagaccctgtctcaaaacaaacaacaaaaccaacaaaaagataattggaaccaattaatagaattaaaaaagtattctgataagggaaggtcacctcagggtctgttagacttccacaacaaaagtcttccatttggataggaaaggacagggcgagggttggatccctaccacggagtgattatatggccatgtaattttactttggcaagtgatgataactggtggctgaatgatggggcttctgggcagccagtctccacatctgtgtgtgtctctgatgtgtgtgatatgcgtcatacagtgcagtaccacagagctggaaaaaccatgggaccctgttagattttaacaagcgtatatgcagtacaagagagaacacagccaaactgagttgaaactgctaagcagatggtttgttctctagctaacttgattcgttcccacatattagccttgcagtatgagaggttctaattcatttttcagcaaaattatttattactagatgtcatgcacttttgggtgatttgcagatacctttggtaatcacatggtcatcactgctgggcttttatcctctgaataaacgtgaagcatccctgggtaatggcctggtttagtttgctgctcattaaatgccaagacttgcttcctggtgtccttctaacattttatttggggtttgctctgggaatggaaatttattgtattgttgattttcctgtctaaaatgagatagttgagggccaggcatggtgggtcacgcctgtaagcccagcactttgggaggcggaggctggaggatcacttgagtccaggagtttgagaccagcctgggcaacatagtgagaccctatctctacaaataattttttaaaattagccaggtatggctgggcgcggtggcttacgcccgtagtcccggccctttgggaggccaaggcaggcagatcacctgcggtcacctgagaccagcctggccaacatggcgaaaccctgtttctactaaaaatacaaaaattggccaggcatgatggccgccacctgtaatcccagctacttgggaggctgaggcaggagaatcacttgaacccaggaggtggaggttgcagtaagtcaggatcacgccactgcactccagcctgggtgacagagggagactctgtctcaaaataaataaataaataaataaaattagccaagtctggtagtgtgtgtctacagtcctacctactcgggagtctgaggcaggaggatcacttgagcccaggagtttgatttttttttaaatgagatagctggatttaattttaatgttctgtggttttattatcagtcagtgccaatagggagacaactgatataaaattggagaagtacatttagtcctgtcactgctcccttccagtgtggagaatgaattgggttataacagaatcagtgagcccaaccgctcatgttttacatagcagggtggatgaggggaaattaaatggattatatgtccttagatggtttgggggttattctcattctctgtcctgttgaataggcttccgaagatcttctcaaggaacactacgttgacctgaaggaccgtccattctttgccggcctggtgaaatacatgcactcagggccggtagttgccatggtgagtgtgcctgtgtgggatactccaagtatgcattgcttgtcatctgtgctaggctctcttctagacactggggatacagccatgaatgagaccaaatagatacctgttttcatataccagctaatggttagtgataggcttcagaaatgaaatatgcccagaaatgaataggagtagcaaatgatcactttagattgggtgatcaaagaacgcaatttttaagctgtgatctgaatgacaagaagcagcgatctgaatgacaagaagcagccagccatgtacagaatcacagtgaaaaacatttccagccaagcaaacagcatgtgcaaaggtcccagggtgggaatgagcttggctttttgaagtacgggaggagagttgaaatgcccgaagcctgatgggtgggagggaagttgggaggtgaagagttcagaggcatgggcaggggccttctctcttaggggtgtgttgaccatatacttcctgagtgctgggaagctatgggacacttcacacttggcatttctttttttttttttttttgagacggagtcttgctctgttgcccaggctggagtgcagtggtgccatctcgtctcaccgcaagctccacctcccgggttcacgccattctcctgccttagcctcctgagtagctgggactacaggcgcccgccaccacgcccagctaatcttttcgtatttttagtagagacagggtttcaccatgttagccaggatggtctcgatctcctgacctcgtgatccactcccctcagcctcccaaagggctgggattacaggcgtgagccactgcgccctgcccacacttggcattttaaggaggctgctctggttgctgtatggagaatacattgtagaaaggcaagcatgagggcagggagatcaggatcctcagtgctggaataagtggatatactctataaacatttgttcagtgaatgaatataatcttaaggggcctttttatttttccttttttgaattaatagttgccagattttctgctgtgattggttttcttctttgaccatatcttcttctgtccttggaggtctgggaggggctgaatgtggtgaagacgggccgagtcatgctcggggagaccaaccctgcagactccaagcctgggaccatccgtggagacttctgcatacaagttggcaggtgagattttggtatttttcccccttttccaaaatctgatttagttgccacaaggatttgggtttccgaggctggaggtagacatgataccatatgcaggttgattttatcggagtttattgttttcctccctcttaagttggcgtttggctttggttgttaacatcacttagtcgtacctctgttacacgaagtgtagaacctggtacaacacactttgctggccagtctttcctgaaggctctcactgtttgcaccagcgtggccgggagggctggatgtggggagggcatttttcagccttaagtgaatggccattgtaggctttttcttttaacatggtctaatgtccatggagcttcagcttttatgctgctgtggctgtagatttctggcaatgggcgcattttaatccttctggtcttggtcatgtgactatctctttctccacccaggaacattatacatggcagtgattctgtggagagtgcagagaaggagatcggcttgtggtttcaccctgaggaactggtagattacacgagctgtgctcagaactggatctatgaatgacaggagggcagaccacattgcttttcacatccatttcccctccttcccatgggcagaggaccaggctgtaggaaatctagttatttacaggaacttcatcataatttggagggaagctcttggagctgtgagttctccctgtacagtgttaccatccccgaccatctgattaaaatgcttcctcccagcataggattcattgagttggttacttcatattgttgcattgcttttttttccttcttttcatgtacactgaataacctgacctaatagagagtgtaaatactataaaaatgatttattttgaggtctcacatacacacaggcattctttgcctgcccttcttaacccccgcatcccttccactcttggcactgagctattcaacaggcatctatggagcatgtgctacgtggccaagactggactaggtgcagaggattcatcagaaatgaaagaaaacatgagggctgggtgtgctggcttgtgcttgtgataccagctacttgggaggctgagatgggagaccagcctgggtaacatagcaagaccctgtctcactaaaaaaaaaaaaagaaaaattaggctgggtacgatggctcatgcctttaatcccagctattcaggaggctgaggaggagaatcgctagaggccagaagttcaagtccagggtgggcaacatagcaagacgctgtctttacaaaaaaaaaaaaaaaaaattagctctggtgctgtgcacctctagtcctagctattgggaaggcataggcaggaggattgtgcccaggagtccaaggctgcagtgaaccatgatcatgctactgtccttcagcctgggtgacagagtgagacatctcttaaataaaaacatatccatcctgttcttgagaagctcttggggattcagtgaatgggggagtgtgggaagttgtaattcctccaaaaatcagaaaagctaggtagatagtaagcctgagtccctgggatggcctcaaatgaagcaggaggtcttgtaagtagctttgatttgttaggtattgatttggttgctttaatggagacaagatagaaatgtacttctctttcatttgaaagttcaagtgtggtcagttgcagtggctcatgcctataatcccagcactttgggaggccaaggcaagaggattgcttgagcccaggagtttgagaccagcctggggaacagagtgagacctcatctctgccaaacattaaaaattagtcgggtgtggtggcacattcctgtagtcctagctactcaggaggctgaggtaggaggattgcttgagccccggaggttggagcagtgagctgtgatcccgcctctgcacttcagcccgggtgacagagtgagacctgtcttcaaaaaagaaaaagccctagctgctcagtaggggtggtgatagtggtaaggctctgatctttaaggtggtctacacacacctggttccttctaatcagtcctacttggattaccaccccatgtcccttcctgcaagttgggaaggaaagtggaagaagtaacccttttaaagacacaactctgaattacaaccttcacttcctctcacatcccactggctagaacttagtcatatggctgcatctagctgaaagagaaattagaatttttttttttgcttttgagatagggtcttgctctgtcgcctaggatggagtgcagtggtgtgatgacagcagctcactgcagcctcgacctctctgggcccaagtgatctcctatcttagcctcctgagtaactggggctacaggcacgtgccaccacgcccaactaatttttgtattttctgtagagatggggtttcatcatgtttcccaggctggtctccaactgctgggctcaagcgatctgcctgcctgggcctcccaaagtgctgagattataggcgtgagccactgcgcccaccctgagggtttttcttttttctttttccttttttttttgagacaaagtctcgctcttgtcgcccaggctggagtataatggtgcgatctcggctaactgcaacctccgcctcccgggttcaagcgattctcctgtctcagcctcctgagtagctgggattacaggtgtgtgccaccactcccggctattttttgtatttttagtagagacaggttttcaccatgttggccaggctggtctcgaacttctcacctcagatgatccacctgcctcaggctcccaaagtgctgggattacaggtgtgagccactgcgactggccacctgagggtttttcttatctttccttttcatctggcttcggtagaggcaatagaggggaagagacttctcaggatgggggagaagagggtagttggggtgggctgcctttacagacagatgatggcgagatgaatttttttttttaatttagtttttttttttttttttttttttgagacagagtcttgctctgtcacccaggcgggaatgcagtggtgcaatctcggctcactgcaagctctgcctcccgggttcacgccattctcctgcctcagcctcctgagtagctgggactacaggtgcccgccaccatgcccagctaatttttttgtatttttagtagacattgggtttcactgtgttagccaggatggtctcgatctcctgacctcgtgatctgcctgccttggcctcccaaagtgctgggattacaggtgtgagccaccgcacctggccccctttttttttttttttaatttttgagatggaatctcaatctgttgcccaggctggagtgcagtggcacgatctcagctcactgcaacctctgcttccggggttcaagcgattctcctgcctcagcctcctgagtagctgggattacaggcatgcgccactacgcccggctaatttttgtatttttcttggggacggggtttcaccacgttggtcaggcttgtctcgaactcctgacctcgtgatccacccgcctcggcctctcaaagtgctgggattacaggcgtgagctaccgcatccagcctgaatttctattaatacttttacacaaagcgtggcctgtttgttttggggcgtgagatgagcataccaggacttgggggaatgaacatgtgtgtagtgaagctggagggttacagcctccccagttaaggacagtcttcccaggaaggaaagaagaggtgaaagcagaggggtggtcctgactgtaccctgagtagccatcagtgacctgaccaaggggagcagatagctctcccctggacagagaaaagtccgtgcaatttcgagacctgttttcacagttgacatttggtaatccaaatgagagtgtgtttcagatcgaagccaaaaaataacagtgcccccagatgagggcacatgacagtcattgtcaatgtgtggtgggctaatgctctgtaactagaagtttggaaagccgataaggtataacagaggccagattgtcatccatctggccagtgacaggtgatcagcgcagtgctaggggcactcgggtgatggcatgattgctgtggtcagctcagagtcctgaggggaagcaagcgggctctcaccatctcagggcagtaccactgctgtgcggctgtcagtcagtgctgcaggcgccgagaggaggggcttgtgaccgccccagggaagctgggcatcaccaaagggagcttgtttgccagggacactgcaagtaggaagtgtctacaggtcgatgacaggcctaatctctatgacagggtctagactttcctcagggtccaggggcgcacctcagggtgaactggaaaactcgaccgcactttagtgccaggtgggcagggatccccatgtcagggtgggagtggggcggctgattggggctggaaatgtaggtggggaggcggcagccagggagcagggcatcctgcgagaagagcatcccgctaaggagtctgaacgccatcctgtaggcgggggagtcatcaaggcagggcagaggcaggaccagatggccgtttgaggtgctgagcaaagctcccggtttgcgcggagaggtgagatcgaggccccttgggaggccgaggcttaaccagggctcaagcagaggggagggaaggctggatttcagaggtagggaggataaggaccgtgggtgcacgacggggagggagagccaagtcaaggttaatgccggtgctcgggcggatggtgaaagcagcagatggccttgaccggggtagagaactcgagcacaggagcaggttctgtgtgtgtgtgtgtgtgtgtgtgtgtgtaggagcttttggggtcacgggaagtactgagaggtgaggagtgggatttgggacgtgcgtagttgaactcataggacgtccaggtggagaaggaatcacttcctgtctctggatccgtctcgatctctgcctggcgagggcgcgccccggctgggcgtggacactgttctccggccgcgtcgggccgggcgggtggggcgttcctgcgggttgggcggctgggccctccggggtgtggccaccccgcgctccgccctgcgcccctcctccgccgccggctcccgggtgtggtggtcgcaccagctctctgctctcccagcgcagcgccgccgcccggcccctccagcttcccggtaaggcggtgggggcgcatcccctggcgactcctcccgttccctcttccgcttgcgctgccgcaggtgggcccggtctgtgggcgccccccgatttcccgcaggtcccgcgcggcgtcggagcgggagattcccttgcagcttgcgccccgcgggccttcgggctccgcagagggacgccggccctgcgcggggcggaagcggccgggaagccacgtgtccccgcggccgcgcgtggtgggggaggagggaccggcggcgcccacgtggcctccgcgggccccgccagagcctgcgcccgggccctgaccgcacctctcgccccgcaggaccatggccaacctggagcgcaccttcatcgccatcaagccggacggcgtgcagcgcggcctggtgggcgagatcatcaagcgcttcgagcagaagggattccgcctcgtggccatgaagttcctccgggtaactcgcccccgtctccccttccccgctgcagccggctcgcgggtgtttttccctcccggcggcggtttgtccgcgtctgctttccgagttcatttcgctgccgcgaaatccctttgccctctgcccccgcccacggcggcttgggcccgccgaccctttcccggggtggtggggacagacgcccttgggaaggtgaagcgctggtagcgtgactcgccctccgggtttgggttccttcccgcgggccgctacctgcccacccgccgcaggggggcagcagggagcggaaaaaccccgggccccagaccccctgcgcctgcccactcgggtccacctaggcacagaatggaggcttggaatctcctttgctttagtctgaaactccgagttccagtgcggtgctcctcctttagcatagggtagtgagtgtattttccacattaaatttggggcacagatctgaatccctacacttacgggtaagaatctaagtactgaaattcaaccaggctcatcggtgaagagaatgttctcagttattatctgaaatatttaaaagggcattgtgagtagcccaggggagtttaacatgacctctgccaggcagatgacctgacatatgtacttcagttgcagccaaaatttaattccctaaatctagatcctcaaaccacctactttttaggcttacaaaacccctaatgtcattgacggtatgagggtgtctttacgattagaacagtcttggccaggcgcggggctcacgcctataatcccagcaatttgggaggccgaggtgggtggagcccaggagttggagatcagcctgagccacatagcaagcccctgtctctacaaataaataaataaataaataaaaattaattgggcatggttgagtgcatctgtagttccagctacttgggaggctgaggtaggaaaatcacttgagccctggaagttgaggctgcagtgagccatcattgtgccactgcattccagcctgggtgatgatagtgagaccctgtctcctaaaacaaaccaaaacaacacaccaaaaaaagaacagtctttctgttaaaatggcattagtttcatggtttggatgggatttaaaaaatatttatgtgtgtgtatatgtgtgtatatatatatatatttccacacaccacttaggaacgtgggctagaatataaaaccggacttgctaatgggaggttcagaggatgggttggagtctttccagcttagctcctaactggtgcctcctctccaatgccaggcctctgaagaacacctgaagcagcactacattgacctgaaagaccgaccattcttccctgggctggtgaagtacatgaactcagggccggttgtggccatggtgagtgctcgtggggaatgagagaaaatgaggaaaaagtgctcagtgttctttgttagacatctccctcagctaatctaaattttattttatgaatggaacctgctgaagttacttaactgagcaactaggagcttgggaggagaaagcaaatcagaccttagaaatgggaaggatgttagctgggtgtggtggtgcacggctgtaatctcagctacttgggaggctgaggtaggagaattgcttgaacctgggaggcggaggttgcagtgagccgagatcgtgccactgcactccagcctgggcaacagagcgagactctgtctcgacaaagaaaaaagatatgggaaggactttttcaggtacatgtctctatggttaaatagaatctcactgcctgcaagagtggtaaattttcgggccaggcttggtggctcatgcctgtaatcccagcgctttggaaggctgaggcgggtggatcacctgaggccaggagttaatcccagttactcagggggctgaagcacgagaatcgcttgaacttgggaggcggaggttgcagtgagccgagatcatgccactgcactccagcctgggcgacagcaagactccatctcaaaaaaaaataatactcaatttcttctgtttgacaagtgttttagaccttaatgtttcctagattaaaaaactttatcctattttctcatgaaaaattcaaaggtaaggatgtaagaagttctcaatcctatactagaagcagtttcttctggatggtgctaatgtccatttgggagtggagagaatatgaggagagagtggctgggcgaggtggctcacacctgtaatcccagcactttgggaggccgaggtgggtgcattacaaggtcaggagttcaagaccagcctggccaacatggtgaaaccccatctctactaaaaaaatacaaaaattagctgggcatggtggcgtgtgcctgtaatcccagctactcgggacgctgaggtgggagaattgcttgaaactgggaggaggaggaggttgcagtgagctgagccactgcactccagcctgggcaacagaacaagactctgtctcaaaaaaaaaaaaaaaaaaaattggagagagtaaaatagggaggcagtgaaattgttgagaaagtagatctatttcctgttcacctttttcttccttctgctgttccctggaatccttaccctagcatgttagtctttcttttccctcttctagcagtcttctgggatgcccttcccactgatcctattccagactggccactttctcctttcttcaccagttcttctgtgttgatggctgcataaggattctgcaacattgtttatctctgtctcagctaaactgggaagtccccaagttggacagacttttctttgaatcctagcaatacgtttggaatgcagtttttatataggcccctactctctgctggggttagctgataatcatgtcactgatcggtctcattgatgtgtcgtgtcaggtaggagtaaatgttagaccctacctgtcctgagtggcaggtctgattataaatccattttcacactttcgaggtctgggaggggctgaacgtggtgaagacaggccgagtgatgcttggggagaccaatccagcagattcaaagccaggcaccattcgtggggacttctgcattcaggttggcaggtaagtccggggacaggagggtggatgacttttatgcaacaccatttaaagcagacgtcatggcgtatcctactttcagaagaatctgtgcccttttttttttttttttttcttgagacggagtctccttctgcctagctggagtgcagtggtgccatctctgctcactgtaaccttcacctcccgggttcaagcgatcctcctgccgcagcctcccaaatagctgggattacaggtgcacactgccacgcccggctaatttttgtatttttagtagagatggtttcaccacgttggccaggctagtttcaaactcctgacctcaggtgatccgcctgcctcggccccccaaggtgctgggattacagacatgagccaccgcacttggcctgaacttttagttggtgattatcattgtataaaaactttcaggctgggtatatcattgtataaaagctttcaggccaggggtttacgcctgtaatcccagcactttgggaggccgagatgggtggatcacctgaagtcaggagtttgagaccagcctggagcctggccaacatgaaccccgtctctactaaaagtaaaaaattagggcatggtggtgcatgcctgtaatcctagctactcaggaggctgagacagaagaatcgcttgaacctgggaggtggaggctgcattgagctaagatcacgccactgcactccagcctgggcaacaagaacaaaactccgtctcaaaaaaaaaaaaaaaaaagctttcacacatagcttcttccctaggttacttaattttaagcaagacaacaagggagccataagtggtaattcctgtgtagtacagcaaaaaatgctaggtgtggagaagggaagcattctagccacatccatgagtactttgtccatgggtgtgtcacttaaccttttgattccctcacctgtacacagtctgttcaaaacctttacaaagttgtgaggttgaagtgggataaagggatttttattaataagcagtgttatgtcatggttgggctttgcaaatcagtgttataagaaaatgcagcagagctggcctatgataatgaacacatcatatctagttgggatgttgatctgcagtgggtttgagtatcactgtattttccaaaatttgcggaggagtgttttatgtcttcggcaatcttggggtacaagcactcttttgatggggaggccagacttggaagcataatacagttgaaacaaggaatgttttaaatcaagcacttttacagttgtatagctgcttttaaaaggaaatgctttgggggtataaattggtctgttgcttcaagtggcaatttggctgaaagagtctggagtgctgtccattgcggtacccattaaacagacttttgcactttaaaacatggcaacttgtaattgttttctttcttaggaacatcattcatggcagtgattcagtaaaaagtgctgaaaaagaaatcagcctatggtttaagcctgaagaactggttgactacaagtcttgtgctcatgactgggtctatgaataagaggtggacacaacagcagtctccttcagcacggcgtggtgtgtccctggacacagctcttcattccattgacttagaggcaacaggattgatcattcttttatagagcatatttgccaataaagcttttggaagccggacactgtctccttgtgcttatttgatactgagctgaaagaagtgacttggttctctggctatagtagcattatgtacatctcaatcctgcttgtcaaagaatgatctgatcctgacggagtttcgctcttgttgcccaggctggagtgcaatggcgcgatctcagctcaccacaacctctgcctcccgggttcaagcgattctcctgtctcagcctcctgagtagctgggattacaggcatgtgccaccacgccctgctaattttgtatttttaatagagacggggtttctccatgttggtcaggctggtcttgtactcccaatctcaggtgatctgcccgtcttggcctcccaaagtgctgggattacaggtgtgaaccaccgcgcccggcctatttatttatttatttgagacagagtctcgctttgtcgcccaggctggagtgcagtggcgtgatctcagctcactgaaacctccaccttctgggctcaagcctagttggtcaagtggttcttgtgcctcagcctcccgagtagttgggattacaggtgtttgagccgctgcacctggccacttgtaagaaagatttgttgaaacttggagtgaaacatacagactagggaaatactctagatttatgtatctgctgattacaaattgggcaagttacttattaggaaatggaagcctaaagacatctgtgaaatggacatatctaccactgtaattcaaggttaatgaaattatgtatatgcagctaacctagtgcttggcctatagttggtacatatttctgcaaccctaccccttaatttttttccctggggtgagatacttattcatgctggtttcctgggctagatgcagtgagtggttgctagaggcatatttcctgcttttgaggttaattttgctggattggaacagttgtaaaatgttaatagcacctgtcaatacaaatcatttgtagcactatcacctgcaatcaattataaatttatatttcctataaaaaactggtaaaagctaaatgtcactcctatatataacaatcctatgctttttttttttttttagacggagtcttgctctgtcgcccaggctggagtgcagtggcctgatcttggctcgctgcaatctctgcctcccgggttcaagcaattctctgcctcagcatcccgagtagctgggtttacaggcgcctgccaccacacccagctaatttttgtatttttagtagaggtggggtttcactatcttggccaggctggtcttcaactcctgaccttgtgatccacctgcctcggcttcccaaagtgctgggattataggcgtgagccactgcgcccggccaattctatgctttttatgtatactgctatggtaaatattagacaatgacattgtgacataagtacgtatttggtctctgccattggttcctggcacacagctcctaaaatccttgtaatctcaaatgttaggtttcttatatgctaatgatatgactggtggctgtgggggctcctggatagcctccctacaacctccaagaagaggagaggggctaaggttgaattgctcaccaatggccaattatgccatcaatcatgcctatgtaatgaagcctccataaaaccccagaatagggtttggggagcttccagattgctgaggtgcttggagggtggtacactctgagagggtagctccatgccattttccacataccctgccccatgcatctggtccatctatatactttatttttttagagatgggggtttcgctatgttgttcaggccaagctttgaactggctcaagcagtcctccccactcagcctcttgagttgctgggatcacagatgcgcaccactgtgcccagccacatcctttattaaaccaatacatgtaagtagtagttctctgagttctatgatactctctagcaacttaactgaatctaagaagggggtcatgggaacccttaatttatggccaattggtcagaagaacaaagacataacctggggcttgcagttggcatttgaaatgcgggcagtcttgggggccggagtccttaacccatgggatctgactccaggtagacagtatcagaattgaagacacccagctggtgtctgctggacactatgtctagtgtcagaagtgttgaggtcagtgacagagtagagagaaaacagctcaattttcctttggaatgaagtaagaaatacttttaatgttttagtacaaaaaaaatgtgtaaagattctagttactagtcaacaattgataagtttattttaaaaatcattcctcaatttcaaatgtaattcatatatgtttatatatgctacattctcatcacagttaagcagagtttaatactaacatcttaagagtctggggcagggcctgagcacctgcatttcactgtgctaccagtgacacttatgcatgctggtggaggtacctcggttaggagcagcagcagagcatgggcttactctgccagggctgttcaaagaactttatatacatgcattcattgcatcttcatgactcttgggtggctggcaccagtatccccattttacaacggaggaaactgagccaagttacataactagccgtggaggaggagccagtttccaacccgatagctgtcttcagactccatgcccacggccactatgctttaccttttttttttctttttgagatggagtctcgcactgtcgcccgggctggagtgcagtggtgcgatctcggcttactgcaacctctgcctctcaggttcaagtgattctcctgcctcgcctcctgagtagctgggattacaggtgcccgctaccacacccggctaatttttttgcatttttagtagagacggggtttcactatgttggccaggctggtcttgaactcctgactttgtgatccacccgacttggcctcccaaagtgcttgggattacaggtgtaagccaccttgcccggcctttttttttttttttttttaaactgtctttactttcccaagtgatgtgaggaagtgagtttggagggtaagtgacgtcaacctgtagtggtgaaagctgagtaaggctttggatgttaggactcaatttgttagaactgaatgagaaatacagagtagactatggtgagatttaaagtactgcctctgggccggcgctgtggctcacaactgtaatcccagcactttgggaggccgagccaggcagatcacctgaagtcaggcgttgagaccagcctgaccaatatggtgaaaccctgtctccactaaaaatacaaaattagcagggcatgatggtgcatgcctgtaatcccagctacttgggaggctgaggcaggggaatcacttgaacccaggaggtgtacattgcagtgagccgagattgcgccattgcactccagcctgggcaacaagagcaaaactccgtctcaaaaaaaaaaaaaagtactgcctctggagagtttaggtcctaatcctgcaccagctaggtgtgtgaaagtaacaactcatttatttatttgagagacagtctcggctctgtcgcccaggctggagagcagtggttcactcagtttactgcagcctctgcctcctgggttcaagtgattctcgtgcttcagccacccaagaagctgggactacaggtgtgtgcaaatacgcccaggtgatttttgtagttttcgtagagatggtgtttcaccatgttggccaggctggtctcaagcaatctgcccaccttggccctccaaagtgttaggattacaggcatgagtcactgcgcctggctgaaaatgacatatcattcagaacatctcatgctttcaataaacctttttttttttaaaaaaaatagtaaaagtgcattattatttaaaatgcattaccttagctggatgcaatggctcatgcctgtaatcccagcactttgggaggacaaggcaggagcatcccttgagcttgagacacttgtttctgggcataactagtttcgcgagaagcatgtaatggttcaaagaaatacatgtggctgggcgcggtggctcatgcctgtaatcccagcactttgggaggctgaggcggacagatcacgaggtcaggagttcaagaccagcctggcccatatggtgaaacccccatctctactgaaaaatacaaaaattagccgggcgtggtggcgtgtgcctgtagtcccagctacttgggaggatggggcaggagaattgctagaacccagaagatggaggttgcagtcagctgagatcacgccactgtactccagcctaggtgacaaagtgagactccatttcaaaaaaaaaaaaaaaaaaaaatgctgggtgcagtggctcatgcctgtaatcccagcactttgggaggccgccgaggcaggcagatcacgaggtgaagagatcaagaccatcctggccaacatggtgaaaccccgtctctactaaaaatacaaaaattagctgggtgtggtggtgtgcacctgtactcccagctacttgggaggctgaggcaggagaatcacttgaacccaggaggcagaagctgcagtgagccaagatcatgccactgctctccagcctggtgacagggtgagactccatctcaaaaaaaaaaaaaaaaaaaaaaaaaatatatatatatatatatatatcaccatgatagtaaatgagcacccacctaggaattccagcttactacagcagctgttcaaaccacttacggtagaaagcagggcagaaatcaggctcttttcttggaatgcgttatgtgaaattaatccctgaagaggcccagtccatctcattactgtcttacatattgtttcccaattcataaaaatctctaccaactgcatctgcagtaaaagttgaataattttccaaagagccagctgttggtaaaggagggcttctttgcattcccttttaatgttaagggcaagagctagctgggatactttatttacatccaattaactttgctgctgaggttaatggagttaaaaaaaagtctcctactagccaggcatggtggctcacgcggtcaggagatcaagaccatcctggctaacacggtgaaaccccgtctcgactaaaaatacaaaaaattagccggtcgtggtggcaggcgcctgtagtcccagctactcaggaggctgaggcaggagaatggtgtgaacatgggaggtggaggttgcagtgagccgatatagcgccactgcactccagcctgggtgacagagcaagactccatctcaaaaaaaaaaaaaaaaaaaaaagtctcctactaagcatgccaaccccaaaacacgatgttctagctaagatgatttaatttccccataaaggtccctattcaccttggctcctgctgtggtttttgccctttccctccctgcccatgaaatcccacctccaatgcaacctcatccatatgtctaaccatactactcttggctcccttggcagctagtggaaaattcttccttacagcactcatgtgcctgctaccccttgtaagaggaaggggctgatccaactttcataggggtctctgactgcttatagagggcacgcaatagaaaagcaaccccccaaaccaaagcatattaaagaactgctcaaatccagcttaactttaacattttattttgtgtaaaaaagggcaaatttagtgaattattttcatcttgtacacaaagttataattttaatgcttttcacatccatgctgaaaatttgcaatttggtaaaaatgaaaggaacataaatttttccaaaggaatttttcacgccattatatatacacttcatgagaaagtttcaaacactttctcaatgatcacgagttaccaagaaaataaaagattaaatttgtacagatattgatctatatatcaaatacatacagaaatgatgtaaaaaccttatgcagtttactttgacctctgtcctcaaaagatttgcccagggacagatgcttttcttttgtataaatgactgtggctttatttaaaatatgaaaatcaaaggaagaaacccagtttaatcacagtatttttaaaatcccttcccaatattaaaggatcattaccaatatatagcaccataatacaaatattgatgggagagggtattcacatcacgcaaaattaataataataataaaaacaaacaaacactgaaaacccgtgttagtatcgtagaataagaagttgataacagctttagctttcctcatacacggcaaggaaaaggttaaagagtttaaactaccaaaagtccccaaataaatcctaacaggaaaaacaaaacaaaacaaaaacaaacccaaggtcagcagtacattttgaaccgtaaaagagaatggggcgattgagttgtacaactggagttatggctaagacataaatctcctctgcattaattatttttcggttcgtcggcagtaggagttagtgtgtgaacaatgaaagagggctttaggttgtgttcagactgtagaaaagtccttaccaaccttcaactgttggtcacgggatcaagacaagaaacacttcatgaattaggaaattctaaaacactcagagcctgggtttgctatagaattggaagcttatgaaacctgggtataaatgagcatttcatagattaccaggactgactagctccaaatcctctctctcctggtttagtcagttccccatggagctcctaaatccaaggtactggcagagtacactacacaacaggcttcttgtgcctgtgctgtggaattagtcctgggtttaattcagtgagcctgagaataaagactgctctaacccttgctttggaatacttctaggctttaagtttacaagaagatttttcaaagttaaagatatgggaagtgtgaggatgtcacatttacagtaggtccctctcagcaatgttaagataaatatccagtaatttaacagctgaattcacatatatttgacacatgagaatcaacttgcgttgatgtgatctgcatttatgcccctaaagagtcagtattaagaaatggtgacatgcgattccatacattcttacactataaagtaacaaattttacttccagtagctattataaaaccttatgttattaacccctcttgcatagaatgaggtaaacctgtgcgtattaccaatgctattattcccaaaagtagagcaatattttagaaaataaattgctggttttttttaacgttctatgcattttaaaattcaaacaaaagtcttacctaaaatggtctcctggggctttccattaacattttttaaagcattccataggctgaaggactgtagaggttaatcattttgattaatttctaattagccctacctatattccagaggagatggtcaatattaccactctgaagaggccaggctaagacccagaagcacttctagaacagatgcaattaattcctgagagtttagtttatgaacctcactggtaaacgctagagcgctctcattcagtcacaactcagtagaaagttagaaaatgcagagagcaaacctttcaccagtttacccttgtatcctttttttttttttaaaaggaagtcatatgaattttaaaacagggaatgttcaaaatggtccaaatcggttattattaaaataaatcctgaatacaattaaagacaattttatatatatatatatatatatatatatatatatatatatatatatatatatatggaattttaagaaaattaaattctctttcaaattagttttctaccaaatccaggatagataaaagcagagctggaatgattttgaaatctaaacttattttggctttgaataactttcaattcgattctcctaatacagaacatctgtttttggttgtggttatacgaagctgttatttcacagatagagggaaatggcagagaactgatcagaatccctttcgtggggtattttttttagaaaggaaaataaactaaggacaacattacattttccccaacccctcaatgtgtagactgagatcctgaatatcttgtcaaccattccagtttaacactttagtgttaggataattctaatcatttttttaattaaaagagaacatataaaagtatccagagttcttccagtttcatacagaactccaaataaattttcacagaatgaaaaatatttctgtacaaacatttaaaatgggctgcaataaaatgccaacaagagaaataatgacccttccatgacctttgtggtgatgacccctccatgaggagttcagttgcatatttctgcagcaaaagaagctggagatgtgactggcctaacttctaaaaatcccaaaatctcccaacaggtaccaaaaaggttcatttgtaatgacagttcatttgcatttaacagctatatccttcttaaatcatttccttcaatcctgctacctaaactttaatgttaccaaaaaagttagaatttcagttcttgttaacaatgcacataaatccaaacttggaaaatattacaaaattctttcaaaagcttcaaatacaacacaaaaattgtccatctttataaattgaaaatttcccacccccctgcccccccgactaaaatagctcccccacccacctgaaaaatctggaactgaaatcttctatgtttagcaaaatgtcccagtagagtagccccctgtacagctggattgattataaatcagtcctgtgtaaaatccttccccacccgccctcagtttctaagccacctcatggctcttgtttgatgtagaagttggcagagccattgctttcctgatcagacgctccttgaaggaaattataatcctctccatccagcaactcctccttcagctgcagtgttgtcactgaatgaaagagagagaaacatatgggcattaaggctctctagagtactcggattgcctgtgatcttcgtgttccgtcagctttacagttattaagacttcttcatttcttcagttaattttaattttccagtatattagcagttaagaaacattctggaaaggaacagtactgtgtaatggacatcttcaatgaaatgttcgcagtaatggtgctcactaatctgactgggataatgagaattttgtttgtgattaagtattcacttttatgtcaatgtttgtacaaacaatgatgtagttctttcatggttctgaagtacaatctttttttttttttttttttgagatggagtctcactctgtcatcaggctggagtgcagtggagtgaactcggcttactgcaacctccgcttcccggttcaagcggttctcctgcctcagcaccgcccccccaagtaggtgggactacaggcacccaccaccacgcccagctaatttttgtatttttagtagagacagggtttcatcatgttggccaggatggtcttgatctcttgaccttgtgatccgcccacctcagcctcccaaagtgctgggatgacaggcgtgagccaccgtgcccggcctcaaggagtacttttattaaaaagattctctgaagaaaaagatataaatctgatgttaaataaaaacattaaaaaattataaattacataaggatgtaacatatatttttaaaaagtaaatctgggctggatgtggtagcagcctgggcaatgtagcaaatccccatctctacaaaaaacaaaaaaaagctgggtatggctgtgcaagcctgtagtcccagctactcatgactgaggcagaaggattgctggagcccaggagttcgagattacagtgacctatgattgtgtcattgcactctagcctgagtggcagagtgagaccctgtgtacctctcctcctaccaagaaaaactaatattaaactcctgagccgagtgtggtggctaatgcttacagtcccagctatgtaggaggacaaggcgggaggccagttcaaagctgagtgcctgcctgagttcttatctgatgacttactttttaacaaaaacaaattaacagtatagccatgtttccgtaggtctttagtatggaaaacggtttttcagtttcatatccccaaagtgctgggattacaggtgtgagccacagcgcctggctgtgttcaggttaccgtctaaccaaagttgagctcaaataatttaaagaacagatgaggtggtcttttgtgctaacacatccacttgaatctagtcccgtgttgagcaatgctaccttctttcccaacttctttagcatacacggatctgctaaatcagaagtcagaaactgctttttccactcctgcctgggccctgtgcatttttttttttttttttgagacatagtctcactccatcacccaggctggagtgcagtggcatgatctcaacttactgcaacttctgcctcccgggttcaagtgattctcatgcctcagcctcccgagtggctgggattacaggtgtgtgccaccatgcctggcgaattcttttgtatttttagtagagatggggttttgccatgttggctgggctggtcttgaactcctagcctcatgtgatccacccaccttggcctcccaaagtgtttggattacggtgtcagccaccgcgcctggcctctttatacatttgaatggttctttacacatttgactgaatatttcgatacaagagatttcacatgaaaatctgaaaagtagatagacttggaaacataagcgcagcatccttaaagagctgtgatcaatgggaactgactggctacttactaccccctgaatctgggcagcctgagatctctgtccaccacagagctcactgcccaggttgcccacaatactcacacaggtaaccaccagcccctgcaggcatctggctccagatcaagggtaaaagttcttcatttttctctattatgtatcttttcattaataaatggagaggatacacatatatggggtgtaaattggaaactgctcatacagagaaaaaaatcaactgatgagaatgagaactcagcagagtatctggataggtagtatgccacttaagtttttcatgaagcaatggcagtgtcatcatgtggaacaatattaaaattgctacaacttttaaagtcaaatagtacagtcagaaaaataattcatgtctttatttttttagtagagatggggtttcaccatgttggtcaggctggtcttgaactcctgacctcgtgaccctcccaccttagcctcccaaagtgctgggattacaggcgtgagccaccgtgcctggcccatgtcttgattttagttacaagcaattagtttaaaaataatggctgctgacatcttacttgctaatttaaagaataatcttttttttttttttttttttttttaagatagtctcgctctgtcacctagactggagtgcagtggcacaatttcggctcactgcaacctccacctcccaggttcaagtgattctcctgcctcagcctcccaagtagctgggatttacaggcgtgcaccaccacacctggctaatttttgtattttcagtagagatgtggtttcctcattttggccagctggtttcaaactcctgatctcaggtgattcacctgcctcaggtgattccccacatgggataacctcccaaagtgctgggattacaggcgtaagccactgcgcctggccaagaataatcttttgagagatggcaatttattttatttggtactggttttggtactggtgatcaaaaatttaacagaccaaagacagaaaagtgaatacgttatgcatataatcatagcaaacacccatcagactgttcaaaggtacagcaaacaagactgtgcagttagttcttcctttcattaaaaaattacttaatataaataaaaatgcttttatgaggaatgatatcaaatgcatgacagttatccttcaaatctagccagcatgcagtcattcagcgtgagggccattttaacaatacctagaaaatacacacatggaaaagaaaacaaaacccaagtttcattaaaggtgcagtacccacaataaaaggttgattaaaacagtatcttgttctatgatgactggatggctaaatgaatgagaaaagaattaatgtgcttcaagatcaaacatgtttcattcaaacggatgttttttaaaaaaatgtaagaaaggtaagttgagattctaaagcatatcttgaagcaatatgcattactgctaacaacaaatttctggattatgcttctagtcatgttaaaatatgaaaatgatgtgctaaaaaaagtcactcaagataaaggtgaaacactcactcagatgtgcaatgttttaatgtaaagtttcactgttttcatggaatctaaaataaagcctgtctggttatcttcacatgaatcatttctcctttccaggccttctcaataaatgatggatgaaataaaacagatcctgtggttgaatgtcactttctacacaaatgccttttcttttctcagctctgtttttagaaggaagtcactttgttgacactaatcactaccatttcaggagataagctaactgaaatcatatttttccagctacgaagcccataaataataaactctttcaacagctaatgaaaccatagctttcagatagttaaggtagcaatgtagtccctacttagtttcatcagagaaaaatcacaccaagtcccacaagttgtgccccagctcagaatatactatagacatcggtggaagaaggaagtcacataggatgccaggtagtttccatctagttcgtctactctaaattcttgggttttgccagtgccagaagttccattttaaatgaatcagtaacctatcacaaaatgtgacatacatcttcaaaaccagcctcatgcttaaagaaaatacatccaagatccaataaaagctcaaatatatttggaactcacaatatccatacttaattaagtaatgcaagactatttcataaataagtgcaaaaagaaaaaaacttagacaagaaaggaaacaggaacgctctttagactttgaacatttttctgttaaagagcaggtaacactggatttacaatcctaatttgtttttcgtacaaaagaagtagtgtaatttcctctggatgtaagaacatcacagtgatcttcagagaaaaagactgggaagggggcaagatggcctaatacattatgagggaggcaaaagctaaagaacatatcctaaaatggcaaaaaccaccaaaaaaccaacaacggaaacaaacaagaaaacccccataggtgcaaaaatattagcaaacagaagaatgagaagaaaacagagctaggtaacaagtctcatctaggttttcaacatacaagacattttaaagaatgctcattacagaaaacaagtctaaaagcaatagttagcatatggcagaacatatgctaaggcaggtataactttggctttgaagctgtatgatctgatctgtactcatgcctgaagttcatcatacctaagtgaagttctcatgccctatgataataccatgcttgttcttaggaattacaaagggcaaaaccttctgcagtcttccttacaatcgactaccttggcctaaccaattacactcgaatcaaatgccactgactaatcactatacatacataatcatgaacttatggaaataataaaatgcaggtattgaatttccaaatttgttattcaactaagattgtgatcaatgttactgccacaactaaaattaaactagaactcaaaacacatcctttccatgaatgagatactatgaaatgttatgaacaaagcctcgtttttctgtttttttaatcagacttatccctaatgacacacttgttcccacgtcaagtcacatacaattctgcaatgaggaatgttcaaaaccatgaaatattccaagttgtctcacaattccagaacttgacattataactacccttatttgaagctcggaagtattttataacaaagtaaaaaatccttccctgatgttttgtcttagtgaagtgactactaagcactagtgaaatgaattctttagttgaaagaaaaagaaaaaaaattcaatgagtcagcatctgtcatgccagaccatgctttgtctcccaccaccctacccagtacttttaccctctgaagtacctgagatgctgatgtgactaattacctgttttgaggctgggactgaactctcggctagtgctgggaggtgggaaggcctccggggctgtctgtgctggaagggttcgatatggaggaggagtcaactcttcgtcaccagagaagctcctccgcaccccacctgtcatgggcaggctcgacaaactgacaggcttcttcccaattggcatcttcctctctaaatatcaagtcagactaaagtaagctttcacttacatgcgtggtaagaaaagtgcattatataactaggaaagctgtgctgcacaggacactctcaaaagagaaccaattatgcaaagtttgtatttctgaaaagaaggaaagagagactgactgaatgtgtgtgttgggggagattgtttctactctccgagagtctggtaataactagttctgactctcaaatttaaaacaagacaaagtaaaatgaattacagagagctttaagaacagctgggccggccgcagtggctcacgcctgtaatcccagcactttgggaggccgaggtgggtggatcacgaggtcaggagattgagaccatcctggctaacacagtgaagccccatctctactaaaaatacaaaaatagctgggcatggtggcaggcgcctgtggtcccagctactcgggaggctgaggcaggagaatggcgtgaacctgggaggcggagcttgcagtgagccgagatcgtgccactgcactccaacctgggcgacaaagcaagactctcgtctcaaaaaaaaaaaccaaaacaaaacaaaacaaaaagaacagctgaacagctggccaatttctttcaagaaagtctctgcttgagatgggataaaaacccaaaggaaggaagaaagggtcttaaaacactacttttaggtagcatttcatagctcatataagcccaaacactggtggagaaatcaaaacaatttaaatgtattatctgggtgtaggaggttactgatatgaaatgtgctctcctaacttttagtttacaattcactcttttagaaaacacaattcttattctaaaatgtacttccaaattcaaagcttattgcctgtaaattcttaagcaatctgatttattctgaaacaaatttatcaggctgggcatggtggcttatgcctgtaatcccagcaccttgggatgccaaggcagaagaatgaggatggcttcaggccaggagtttcagaccagcctgggcaacacagtgagacccatctctacaaaaaataaaaaaaaattgctgggcaatgctggagtctgatgtgggagatttgcttgagcccaagggttcaaggctgcagtgagctatgattgcaccacagtgctccaggctgggcaataaagtgagaccttgtctcaaaaaaaaaaaaaaaaaagtatcacccttcagctatagttttctatacaaatataagccttccaagacatgtacaatgcttttgccaaccaaaaaaaatactctgaactctgcaaatattgaagaaccaggcatagtgcattaatcatattgaaagctgaaggatcagcagggtacagtggctcacacctatgatcccagcactttgggaggccgaggcaggtggatcacttgaggtcaggagttcaagaccagcctggccaacatagtgaaaccccgtctctactaaaaatacaaaaattagccgtaagtagtggtgcacacctgtaatcccactacttgggaggctgaagcaggagaatcgcttgaatccgggaggcagaggttgtggcgagccgacagtgcaccactgcactccagcctgggagacagagcaagactctgtctcaaaaagaaagaaagaaagaaaaaaaaaaaaaaagcaaagggatctttatctttgtgactgagttatgtctgttttcttccagatgacagaataaaccgagtaagagcaataaaaaattatgcttcacaaaatcaaaactaaaaggtaaatgtaagccacacagtattcctatgtaaaatgatgtgggatttaagctgttattgagtagattcaactctcaagagccaaaccaaaatcacatgcagcaacaacttaagactttttcctaatataccacatactcacagataaaaacgcaaggagcaatgtccactcttactacttacagtagtccctgaaaatggtgagatttaaagcagaaatcagtactgcttttcctgctctagaattacatcttaaggaaaagaggcttttgagactagagagtgtctatgatccttctggcagaaccttatacttattctcaaaagtgtcagtaattatccctccttcgtggcatgaacacaacttactacaaagcaagctagaccaatgaagctcatcagctgtttctgtacaataagcactgccaaagaatataccactaacagatgatcttaagttcaaaaagaccaacgagctgtaagatgaagcaacagagccagaatatgataacctaccaaggcaaacgtaaaaacaaaaggttttatagcccatctggtatttatatcagtctgcctgcaatggatgacaggtttctaaaccccaaatacttatttgtgtaactaaagcttagtgagaaaactttctaacaaactgctgagtaatagaaaaaaataagaggcggcggcaccattagagtgaaaactgctgcttcttaatacggcactatacttccttatcctcaattccaacattcaaataggtttttttttttttttttttttttgagagggagttttgctcttgttgcccaggctggagtgcaatggcgcgatctcggctcactgcaacctccgcctcccaggttcaagcgattctcctgcctcagcctcccgagtgctgggattacaggcatgcgccaccacgcctggctaattttgcatttttagtagagacggggtttctccatgttggtcaggctggtctcgaactcctgacctcaggtgatccgcctgcctcggcctcccaaagtgctgggattataggcgtgagccaccgtgcctggcctcaggaagtttttttaaaaagaactttggcaacaaagccgtacctcacttggtgacactacttataatttttatttgggccatttaatgtaaatatttatatatatatttgctttaaaaatgtttcagagtctggagtgttacataatgtatgttacacagactatatttctcttctaaaatccaaaaaattctgaattccaatgcacatctggtcccaagggcatctaatgaggtactgtgggtccatagttcttttcttttctatgtccaaaggacaatttaaaggtagtagagatgatgtcatactattaggaaatagtgaaacattatagttaaggaatatgttgcatatagaccaaaattcattttttcagtgaatccagaactctagtaatggtaaatatcactaaaaactggggtgctaatatttcttcattaattacatatttctttccatgttcccagcccattaattcaaaacagttttaactccacaaatcagaaacaaatcctacaagagtcacgctgagggaggcaaatgaattgtctacataaaactcacagataagttctaaaaagcaatgtcatatagccactgagtaataaaaaccatttttaatttgacatcttggaaagaaaattctgaaattccaaagtcttatccaacagaaagtgaaagcagacttgttatttacttcacagaaagcttagtgatcatatctgctattgtcagtccactgacataaatgaagttcccatgtgaattcttgctactcatttagatacatgagaactccctttcatcaggctggtttggcaatgctccctaaagttcttttaggtgagtatcagacctggcaagcagctggtgggcaaaataattctgggcctgtgggaggcttgtgcctataaacgagaggtcaagagacaggcctgtaggttgctacttgtgtgtggctgacatgggttttgtgctgggagaaaacttatttttcaaagtactactatagtggacagtagaaatttttaagtttcccacttaacaagcaaacatcagaaaggttagaacagagtatattcgattcttcttgccacttcagtctctaggttgttaatgaggcaaatcagcacgtacctgagcatatttggcaagtcagctggaaaaatctgtttcagttttaatcctcaagtatacttttacattttttaaatagcttgcttttttcttcctttttttgtttttagagatggggtcttgccatgttacccaggctggtctaaagccatccgccttggcctcccaaagttgctgggattaattacaggcatgagccaccgcgtccagtccaatttaaaaaatatctttaaataaaaattggccagactcagaggatcacacctgtaatcccagcactttgggagaccaaggcaggcagatggatcgcttgagcccaggagtttgagaccagcctgggtaatatggtgagacaccatttctataaaaatataaaaacgagttgggcatggtggtatactcctgtagtcccagctactccaggggctgaggtgggagaattgcttgtacccgagaagtcgaggctgcagtgagccaagatcataccactgcattccagtctgggcgacagactgagactctgtctcaaaaaaaaaaaaaaaaaaaaaaaaaaaaaatatatatatatatatatataaccttatctaagaatgaaatgaaatatggccatgtgtggtggctcatgcctgtaatcccagcactttgggaggctgaggtgggcagagtgcttgagcccaaaagtttgagaccagcctgggcaacgtggcaagactctgtctctacaaaaaaatacaaaacttagctgggtgtgtggcaacacatgcctgtggtccaagctactcaggaggctggggtgggaggactgcttgagccagggaaggttaaggctgtagtgagcggagattgtgccactgcactccattccagcctgagcaacaaagtaaggccttgtctcaaaaaagaatgaaacattctatgacaagttttatgaagagagaaagctatggctttctatggtggggaaataagataaaaaaaatcaaacatagttatcaatatattttatattactttggcttatgccaacaattcactgtaaggtaaaatatagtatagaaagaatttctttttttttttttttttcgagatggagttttgctcttgttgcccaggctagagtgcaatggcacgatctcggctcacctcaacctccgcctcctgggttcaagcaattctcctgcctcagcctcccaagtagctgggattacaggcgtgcaccaccacacccggctaattttttagtatagaaagcatttctagaaaaatttggtaaagcttgtttgccatcaacttggatttcttaccagtatcactctagaaagttttgctttctaggaaaaatgggtttattaggcttcacatctactgtaagcatcaagcatctgctaatttttttttttttttttgagacagagtcttgctgtgttgcccagctggaatgtagtggcgtgatcttggctcactgcaacctctgcctcctgggttcaagtgattctcttgcctcagcctcctgagtagctgggacttcaggcgtgtgccaccacgcccggcagattttttgtatttttggtggagacagggtttcaccgtgttagccaggatggtctcgatctcctgaccttgtgatctgccagcctcggcctcctaaagtgctgggattacaggcgtgagccactgcacctggctgctaatttttctttttaaataaagtttttaaaaaggattaactttcagtaggttttacatattatttcaagaatcattcacagactctattctttaccacgtatactttaaatactgtggtaataatttctcctgttagtaaaatatcagtgtttctcattattgcaagggtttgccttttatggcatactgcacctttaagcataatacataatgcacaatcatcagttctcacaagatatatcattttctgtccaagaatactgtgactccaattagttaacaattagaaaatgtatgtgaacaccacgtggtgacccacttttcttatgtcctttgtattgctgggacttagcctttttcttctgttttgatgaagctgattggttttctcttgatgctgaaaaataaaaagggaaaattggtactagataattgtttacaatttagacgatacagttgtctagatacaacttatatgaactatctttaccaagaccattatacttaagtacatgatgctctgaaaataagggtacttgttcctacaaaaccatagcctcaacatgagacattttccactatttactcaaaagcatttattacctaccaataaacttttagtatgtaatttttaactcactaaaatagtaagtctagtttaatttggtgactgttgtgtttctatagtcattatgtaattgactattggattcacattgccatgggacacatggtctgattctgtgatattgttgttgagtcttaatgtcttacctggcaaccaatcagacataggtatattcttgtcctgtgagctcataagatgacttatgtgagatagtcctctggagaattgctgatttttacaaaaggacaccttttctgtataccaacttacactgtgatgctggaggctgtagttgatatccagttaactgacaccaccctacaggatagaggtcaggtgactcacagtctacccactgatcatactcttcttcccatccatcaaaatgtatcctcaagagacgatgaataattcgagttactgtggctacacatattaaacgtggctccatgagatctactgcttctaatttcattcctacacgaaatccgtgatttggaacatcctgacacagagaagaaaacattaatattggtatgaagaagaaagaatgcacaaccctactatcactaagaaagcaaaaaacagaagcgactagctaaataacataattataaaccataaattccaaataattctttaactatttaaacatagtacgaaggtgaagtatttaaaaactagttaggaaaaatcttcatttctatttccttcagattaaaaacgaaacatagtttggaaacaagttttgattcctaggtaaagaaaatatttatattgtttcattgctatatttgtttatattatatctccactaagaaattctaatacaaggcaaagacatttttatgaacataaattgtatttgtggggcattaataagtcctcacataattatgctgccatttaaatttaccttattaaatagttttactggtgctgcaatggagccagtttccctgaggtagtcaaaccatttaaaaggaagttttgtgtaacctaaaaaacacaactggtttaactagcagttcatttaaaattagcataatattaaaatgcagacaaaaagtaacagtacaaaaaatcttaagagcataggttatatgatcaactttattttttttgagacagggtcttgctctgtcgcccaggctggagtgcagtagtgccctcaaaggcttactgcagcctcaacctccagggctcaagtgatcctcctgccttagcctctctagtagctgggactacaggcacatgccactgtgacaggctaattttttgttgtttttagtagagacagggtctccctatgttgcccgggttgttctcaaactcctggtctcaagcaatcctcctacctgagtctcccaaagtgctgggattattggcgtgagccactgcacctggcctatatgatttatactgctgagtgcaataattcctccatgttacacagatttccctcccctctctagaaacactggtgtgcctacttagtctaacgcaaaagtggctctctttttctgtttactacaatggtacatttttgctctttcaatcctaggctttagaagagtctagcacctaatactatggactgatatttttctttcttgcaaggaaagaaaactggctgagcaaatactattttttatagacctctgttatagctttcctcctttcttagaggaacaacttaatgctcaagtattaaaattggaaaaatcactggttaaaccacgagtaaaacagccatccttttaaaagtccacatagggctgggtgcagtggctcacgcctataatcccagcatgctgggaggccaaggtgggtggatcacttgaggccaggagttcgtgatgagcctggcctacatggcgaaaccctgtctctactaaaaatagaaaaatcagctgggcgtggtggtgcacacctgtaattccagctacttgggagaggaggcacaagaatcacttgaacctgggaggcggaggctgtaaagaggtgagatagcacccctgcattccagcctgggtgacagagcgagactgtctcaaaaaaaaaaaaaaaaaaaaaaaaaagtccacatggctaagtgtggtggttcactcctaatcccagcactttggggaggctgaggtgggaggatcagttgaggccaggacttcaagaccagcctgggtaacatagtgagattcctgtctgtacatacaaagaaaaaaaaaaaaaagtcagacatggttgtgcctttcagctgtagtttcagctactagggaggctgaggtgggaggattccttgggcccaggagttgaagttaccgtgagctatgattgtgccactgcactccagcctgggcaacagagcaagaccctgtctttattgggaaaaaaagaaaaaaatcatgtatgccatagcctgttgagcctacattactgactcaacagagtttgagaataccaattcatattataaaatacacagatgctcaggaaaaattctatactactgtaatttattaaagtacgctagaatacagtactttatatttttagagcaacctacagctcctgtatgtatatgtttatccacacacattatatacgtactcaggaaatctagggctgtgttaaatgttgtaaacaaaaaccatgtaagaagaaagcaacaattaaaacccagtgtttatattaggatgaagtacctctgggtggagtaagttcaatcatgttaatttcacagaaaccgacagggaaaatagaaggagaggttgcatggtaacagaaccagtcagatccgtctgctgcttctgagccatcgatcccaatcatcaggaatccgtcagctagcaccttttcaatgaagagaattctaagtacttgaaattagataccactattataaaaataatactttgacattctaaaagaaaggaaaatctattatataaaggtctcttcaaagtgaaacatgcttctctattgagttatgttaaataacagaagttctaatgaaaaaaatctatgtaaattctagtgtgttccagaaacaaaagcaggattacctataactgacctcagaggtctgggaaaagcagtgcgtttgaccatagctatagctgcctgctgtcacggcatcatgaaactgggctgagtgcttactatttacctatctagtttcagctaggctccaaatcctacttggtaacactttgacttctttctttctgatttatcacatacagagtttttacaaacggtctctaccttcttcaagctccaacttgatctcttttatgctacagataaccatactcctctatggcagatgctaaggctggtccacattaagggtcctcttgttcatttcttcacgcctcagagactgttgtaacaagtacccaactctccctttttgagacaaggtctcgctctgtcactcaggctggagtgcaatggtgcgaacatggcccactgcagccttgacctccccggctcaagcaatccttctgtctctgcctcctgagtagctaggactacaggtgcatgccatcacactcggctaattgtttaatttttattttgtagagatggggtctcaccatgttgctcaggctggtctcaaactcctgggctcaagtgatccttctgccgtggcctcccaaagtgttgggattactggcaagagccaccacgtctggctgtgcccaccctgcctttttttttttttttttgagacagagtttccctcgtcacctaggctggagtgcaatgggtcaatctcggctcactgcaacctctgcctcctggattcaagtgattcttctgcctcagcctcccaagtagctgggattacaggtatgggccaccacgcccagctaatttttgtatttttagtagagatgggatttcatcatgttggccaggctggtctcgaactcctgacctcaggtgacccacccaccttggccaggctgccccccctttttaaaactaagacaaacttccccatcttgccctattaccactggaattttgctttcaaaagaccatctcttatactctaatgtttcccaatttccactatattaaaaatattttggctgggcgtggtagctcatgcctgtaatctcagcactttgggaggctgagatgggcagacacctgaggtcaggagtttgagaccagactggccaacatggcgaaacccagtctctactaaaaatacaaaaattagccaggcatggcggtgggggcctgtaatcccagctacttaggaggctgaggcagggagaattgctcgaacctggaaggcagaggctgcagtgagccgagaccatgccattgcactccagcctgggtgacagagcaagactgtttcaaaggggaaaaaaaattttttttcctttgaaataggttcaaggttatagagtagtagaataaactctattcacccagacactcaattcaagttacataccacgcaactccttgcagttgatttttgtctttatctattattatatatacaagatatatatatatatatatatatatatatatatatatatatatatatatatatatatatatatatatatatatatatggaggacggagtcttgctttgttgcccaggctggagtgcagtggtgcaatctcagctcattgcaacctcccccttctgggttcaagtaattctcctgcctcagtctcccaagtagctgggattacaggtgctcaccaccacacccgacttatttttgtatttttagtagagatggggtttcgccatgttggctgggctggtcttaaattcctggcctcaagtgattctcctgcctctgcctcccaaatattccttcatagttttacttgttgaatttttgtttttggctttttcctgcagtatgttgcctttatctaaactgctaaattcatgaataaactcctaatttgcccaacctcactgagtctctgctacttgctcactactcttaatttttcttttctttttttttttttttgagacaaggtcacccaggctggggtgcagtggtacaatcatggctcactgcagccaacttccctgagctcaggtgatgctcccaccctagcctcctggatagctgggtctataggtgtgccaccacactcagctaatttttgtagagacagtgttttgccctattgctcaggctggtttcaaactctgggggccaaggtgggctcaagcaatctgcctgcctcggcctctcaaagtgctaggattactggcgtgagctaccacacccagcctactcttaattttctgaaacattttctcctagtctcttatcaccttctggtctaccaatcaatcttctcatctctctgatcattctttctgcattccttctggaatgctctttcacctccaaccatcaagtttctgattttagctcttttctgttttgatgacctcatccaccccagtgctacaatgatgagcttctacaccagtgattcctaaagttttatcatgagtttgcctctcttccagtgtctcggtccagcattttatccgcatgctgaacacagtctctgagttagtacagggtgtcaaatcaacaactcctcttactcctttagaggttatcaatcaccatattccacaactccacctcaacttgccattaatctctgtcttgactttgctatcttatttgatataattgctttcagccatcctctatggatgctgcccctcttagacagtaaaactttccttcagtccaacctctgttcaggccagtacctgtaccaagttatcctgtctactaaagaactctcggatgacttgaccaagtgtttaaagcctgtaataatggttccacattatcttttggtctcttcccccaagttcctttctctcgttatttctatatggtaaacatgtacactaaatttactactctcaagcttgagagctttgcctaagacctctggacagaactaccccacttacatgggattcctttcttcattcttctaaatacaggtgactagactagggacttgtatgtatcacatatggaaccaaaccaaaggcttagctcagctattcagactctttctcagtaatcagaattaacagacacagagactgttgtcacatgggtgggatctggaactgaaaggatcctcccagctcagcgtcccaaagtgctggaactgcaggcatgagccaccaagcctggccttgactgtgattccggtcatgtagacatggagtcgatcatgggaatccacgtgatttttgttgttgttgtttgagatggagtctcgctctatgcctaggccgaagtgcagtggctcgatctcagctcactgcaacctccacctcccaggttcaagtgattctcttgccttagcctttcgagtagctgggattataggtacacaccaccacacctggctaatttttgtatggagatggggttttatcatgttggccaggctggtcttgaactcctgacctcaagtgatccacctgccttggagtcccaaagtgctgggattacaggcatgaggcactgcacgcagtctttatttttttcttttttttgagacagagttttgctcttgttgcccaggctggagtgcaatagcacaatctcagctcactgcaacctctgtgtcttgggttcaagcattctcctgcctcagcctcccaagaactgggattacaggtgcctggccccaggcccagctaatttttttgtatttttagtttcatcatgttgaccaggctggtcttgaactcctgacctcatgatctgcccttctaaagtgctggaattacaggtgtgagccacctgtaattgtaataaaaaaagggcccagcctttttttttctttttaacatgatcaaggtgtttcaggaatcactgttttaaaaaaattttttttttgagacagtcttgctttgttgcccaggatggagtgcagtggtgcgatctcagctcactgcaacctccccttcctgggttcaagtgattcttctgcctcagcctcccgagtagctgggactacaggcacccgccaccacgcctggctaatttttgtatttttagtaaagatggggtctcaccatattgaccaggctggtctcgaactcctgaccttgtgattcgcccccctcggcctgttttaaatcttattgggtcattctgatcactagtgaggaaaagaggaagaacagggtttggagccagtcttgtccagctgtctgaccatgtgacatggcagccatcataattgttttcctttttctttttttctgttttttttttgagacagagtctcgctctgtcacccaggctggagtgcagtggcaccatcttggctcactgcaacctccacctcccgggttcaagtgattctcctgccgcagtctcctgagtagctgggactacaggtgtgtgccaccacgcctagttaaattttttgtagttttagtagagacagggtttcaccgtgttagccaggatggtcttgatatcctgacctcgtgatccgcttgccttggcctcccaaagtgctgggattacaagtgtgagctaccatgcctgggccatcataattgtttttcttttagctgaaggttttaaactgttgaaatgcaaatcacgatttaagttacacctttatgtaagtagactttccttaggtggttcttgaccatggctgtacatgatattcacctgagaccttaaaaaaatgccaatgttagccaggcaggtggctcctgcctgtaatcccagctactcaggaggctgaggcagcagaattgcttgagctcaggagttcgagactatcctgggcaacagtgagaccccattgctaagaaaacaacaacaacaaaaaaactggttgggtgtggtggcttctgcctgcagtaccagctgctcaggaagctgaagtgggagaattgcttgagctcaaggctgtggtgagctatgatcacgccattgcactacagcctgggtgacagggcgagataccatctcaaaaaaaaaaaaaaaaaaaaaatgccacgtacggtggctcatgcctgtaatcccagcactgtgggaggctgaggcaggtgggttacttgagtccaggaattcgagaccagcccaggcaacatggtgaaatcccatctctacaaaatatacaaaaattagccgggcgtggtggcatgcacctgtaatcccagctactcagggggccgaggcaggaggatcacctgagcctgggaggcagaggttgcagtgagctgagatcatgccactgcactccagcctggatgacagagtgagaccatgtctttaaaaaaaaaaaaaatgctgggtgccgtggctcatgcctataatcctagcactttaggaggattgcctgagcccaggaatctgagaccagcctgggcaacctagggagaccctgtacctacaaaaataaaaataagaaaattagccaggcatgataggacacacctgtgatcccagccactctgaaggctgaagtgggagggtcacttgagcctgtgatcacactactgcactccaacctaggcgacagagagagactgtctcaaaaaaaaatgaacaaacaaacaaaaaacccaagaatttctcttctaggtctttttgtaagagcagtttcagatgagggggaaaagagaaaagcagcaaaaactactaccaaaaggaagaaaaaggcctaaagaggaaacacaggaaactgaagataaacttggccttgttacaattctgaattggactagccttgtctagaagtaacttaaataaatatttttcctctaaattaggatatacttccataaataagtgtagcagactcaaaatgacaatcttgacaataaactatgtaagatcagaggattcaaatttattttgaaattcctagcaaccttctccccagtgaagatatacacatacacattttatgtcaaaacgaatatgcttggggactccttctattagcttatacccaaatcctataattgcatttctatattttaaaacctattatcttacctttctaatggttgcgacacatattgtagaaagatttaatgggtctatagcttccaatttcattccttccttgaaccattccccactctggtctacttcttttacctaaagaattatatgaaagcacatctactgttacaaatgttgttattttgataattaaaatattaccaatgtgaaaagatttaccaggtgccttctcctacctacctaatattataactcaaacttccattaaggtttagagagaattcagacaaatagaatttaagaataattataataaagagttgtgacacctatgaatttacaaggtcttaattcttttaagtgaacatatgtaattgtgatttccgtaattttaggaaaaaacccacaaccctctttcaaacctaatttacaaatgagggttcttataaaaacttcttaccttagcaaataaatgtggtggtgtatcaaaatgtccatcctgtttctttgtaatatctacaaggaaaagttacacactaatctgtcagcatttgtgagaagaccaaaaaccacgttctttgaaggcttcaaactcacaaagtatgtcatactataaaacatggcaagaagacatgccttctacatttggggtgaatattctttaatagtcttttctctcttcagagtacatgtgcatatatgcttttaaatacattcagccaattttaatgctcataattttaatgtaattccctagttagaaaattacaactttagaagcatgttttcatgtgcttagtattaagtctaaccacatttaatcttgctattttgattaaaattgaatggaaagggaaaggtatctttagatctttcaaatgggctgaataataaaagaaagaaacaattatagttgtgaccagaagaagttccttcttttggagaacaagtggaaggaatataaaaaaatttattaggacactaatatggtgtgaaccttcactaattaaggtagaagaagcagcccaaacaactagaatgctatttttcatctatgcaattctgcagagaaaaataaccaactagtataatcagcctcaatgatgcttttgacaggagttcttgtgataggtgcttaccagatcttttgaatcgatgacctatgcttcgagaccaaccaatatgatgtattaatgggctgtgcatatggcaccagaagtcatctgttctatcttcgctttcttcatacactagtcttaatcttcctccaattacactttccaccactgctactcgtgttcgacacaaatgcctcttgtcaaccacttctactctcatgcaaggtttgaaaggatactgcatactctctgaaaccttaaaagcatacaaaaaaaactgctcgaaattcatgacaaaggtctacaagaaatttttgtattatactgtaaaaaatactgaatgcacttgaaatgtaacacagatcatctggttcacaaaattaaaccaattccttaaaaatgttctctgttacccttgttttttagagctcttcagtctttataagatcctgttttttaccttttgggagaaatcaggaggcagtgttttggcaccagtaagtcgtttcactagaaaagctttccagtttgtatatttatgctgaatagctaaaatagaagaaataatcagttatactttagcaaaaaagaactgcttcataaattatttgttaaaaaagtaacaaatttccttgcaaagtcaggctattaacattctgaaaagtaacaaatatagagaaagcaagtatatgccttgccagcaaaaagctgcttaacaccaaaaaaactattttaatttctttctttttttttgagatggagtctcgctctgttgcccaggctggagtgcagtggcgtgatcttggctcactgcaacctccatctccccggttcaagcgattcttctgcctcagcctcctgagtacaggcatgcaccaccatgcccagctagggagaagttgagatggggttttgccatgttggtcaggctggtctcaaactcctgacctcaagtgatccgactgccttggcctcccaaagtgctgggattacaggtgtgagcggccatgcccggcctttaatttccatattactctaacattactatgtgtaaaatagcattaaagtacacatataaaaaaattacggtaagggtaaataaactacttacttctaggaggaacaagaggttttccgctggctgcacaccaaccaactggatggatatcagaaccacatatattgcaccagaagtccagaccagagtcattttcaaatccttcatatcttaaaagggcattgtaacctgaaacccagaaataaatcactacataataagaaaataaaattaaataaaacaatacagcatctgatagcagttgtcaaactagtgtctatctgcaatacaatcacctgcagggtttgttaacagacagatggctgggtctcactccagagattctgattttgtagatcttgggtgggaactgagaatatgcctttttaacaagtcctcaggtgatgctgttgctgctggtctatgaaccaaactttgagaaccatctgttcagtgcaaacagttcaactgttttcagagcatggcatccttacatgtatttcaattgtacccataatttctttttcttttcttttttgagatggagtcttgctctgttgcctaggctggagtgcagtggtgcaatcttgccttactacaaccttggcctcctgggttcaagcgattctcctacctcagcctcctaagtagctgggattataggcatatatatgtaattatacatataacatacatatttatgtataagcatataaacatataaaaatacatattatatatttatttatattatatataattatatatatatatatattttatgaagacagggtcttgctctatcgcccaggctggagtgcagtggtgtgatcttggctcactgcaacctctgcctcctgggttcaagtgattcacctgcctcagcctcttgagtagctgggattacaggcgtgcgccaccatgcccagctaatttttgtattttgtagagatggggtttcaccatgttggccaggctagtctcgaactctcaacctcaggtgatctgcccgccttggcctcccaaagggctgggattacaggcatgagccactgtgcttggccttgaaatgtatttcaaagaaattgctttatccagctgcttaggtggccaattactcctgggtaatttgaatgtggctactttaagaatctaaatttttctgtcgtatgtatttggaaataagatttgaatatgccaggtaaaaagttcaataaacacaaagaaaattatgtaaaatgagttaaaaactatgtcttaggcaaataggaaggcttactcttggaaagtacaaaaaatatgtaatatatcctatttataattctataaactttatgttgataaaagattacgatttaatttaaggcctttaatgaaacagaaaaaggccaatatatgtgtatttcaggttaggagacaagtttagtcagcattttcatgtttgtgaaaatttatagccttaaatgttcagttttaaaattcaataatttctcagaacaatttatgagtttgctaattactgctgaactctagcttctggttaacattaggctcacttctacaatggcattaaagtggcttaaaagaagatacatgatgcagttagataaaacagaaatgtaaaatcggagatggaaggcagaagtaatttttggatagtaaatgcactgatcttaagagctatttaaatgtaactaacttaaacacccagggcaaaaataatatgctgttgttttaaattacagtgtagagaataatacaagcatttagtgaatgcttatacagctgggaaaatgtttcaagaaaaagatggggaattgacttgggtagtagtacagttcagtacagagatgggacactcttgcaagagtaacccaaggcacagaggtgacaaaaacgtgctgtatgaaagggagagggagactggcctcatcacaacagatcatttatgctggagaactacaatacatctggcatgtggtatatggtgcaactcatcaatagtcataaatgctggctatcttgatcctttaagtacaaagaggccataaaagatgcttgaacagaaaaataaaattaaaataatttttaggtaaattaagtcaattagcagtacacaacagagcagtctacagtgtgttttgaggagaatgccggaaataaaactagagagagtgggaggagttaaaaatctgtcacagtagtaattgaagataacttttcttatgagtggctgcctgcctctcctccacaatgccctactacactactcactgagtatcttgtcatattaatacctggtagtagtcaacatttggccgatgtgaacatgctggaaaaaatacaagtcttatacttctggatatcatcttttgtccacattgtctaccatagtagattcctaacatgtttacttcatgagcagtaaagggcttggtatggtggaggcagtgggaataaacagaacggaagaacccaagatatataaaattatcaacacttgtatcaatttggtattaaggttcttaccactttatttttatttttttaaaatggagaatgggtctcgctattttgcccaggtgggtcttgaactcctaggctcaagctaacctcccgcctctgcctccctaaaagctgggattacaggcatgagtcactgtggccagctcttaccactttttttagtacctcaacttttgttacttttcaaagtaacatatacattatggcctatatatctggtctattgctggattatttttatggctgtgatctaagaattacttttacatttttaatggttgaaaagaaaaaaaggatatttcatgatacataactattatatgaaattcaaatttcctgtaaataaagttctactggaacacaatcatgtccatttgtttatgtattgctaagggtgctttcatgctataatgatagagacggatagctgtgacagagatcatatggcctgcaaagttgaaaatatttgtttggcttttcacagaaaacaatttgccaacccctgccctatatcataacatattttttatttggcaatacttgcaaaatttataaacatgctttttttacgaaaggttacaaggatctctgcattttctactaaactattattcatgcttttcacctgctaattttacaattccagcaatccagaagactttggtaggtaggctgcagtctgtattgggaacttctactctcacattttctgagatatcaccccagcaggtccccataggtgcctgtcacataaaaatcattaaattattgtcttattaacataaagcctaaaacatatcaatgaaaattaagcagtaccatcaataataggaatattaaactaaaaatgtcattttaattccgtttgtttcctagaattctatctggaaaaagccagtttcagggacaaacaagataaagagaaaattcacatatattagactagattcatgctgacttcaaaatctgatactgtcctaatatgagatttaagcagcgatttttctatgagtggaattacaaactcaatagcagatttaataggattaaactgatttaagaaatttttaatatgtactgagtgaatacacttcaccctaatttctacttttaaaagatctggcctaagagcagaaagaaaaacaattccaatcagcagtgtggtttccaacaacatgaataagagaaatgaaaattttcaatttaaattaaattcatagattagaaatctagtccacatagatggacgtgagggaaaagcactggataaagttattaagaaggtggagttgaagagttttggagatgagtaccatggtaaactatttaaattattatttcaaaatttctcatgtagaaattactataaagagaaaacttccaatgttagaaccggtaatcactagcctcccacagcaaatggttaagatggggactcggaaaatcaattaaatgagcatcatgaagggattttctgaaatctaacagatgttcccaaagtattgtttccattatattttaatctttaaaactcaaggcaattcacaattacttggaacttatgcaatggtaaattaaatcaaataagcaaatttaagaatataaatgctgataacactaaacagtttgtgttgctctggacagtcagttcctcattcaatttagaatgttgatcataaagaaaaggattatgtgaggttataaaagacttgatagtatgaacaaatcaggaaaaaccaaaatagcctcaaagctcaaagatgagcaaagatatctaggagttacatgaactagccaatttgaacattaggcaaatgtcctccatgcaaggcccctcctactttggtggatgctcacccaacaggaggattagcctaaaacaacattcaacccctaccctcttagtagtttctggaatttctgaaggagaggaagagaatgtcaaatactgaagttggataagtctagaaaccaaagacagaatcaattaatggctactggtttaagtagtaagcaatgagtttacctcagtaacttggagaaatggacaagctcaactatttgcggttctggaagggtacatataactatctccccgacttgtgcaaaaaataatatattcattgtgactacctcttctttaaactgaaagactggactcttcaggttctgctatctttcccctatatcattctagactgtagggccatccctattgccagcagatatgattaaaaaggagacactagaaagaagacaggtaacatagaataaactaacatatattaacacaaagatcatgtattaatttctgtgaggatgtacctattcgagtagatagatgcagttaaatgaatgcagtgcagcatccatccctctgtctggttaccaaatctgtgaattgggtttatttttcactgagaagaaagaggcgtgcttatgctaatgagctgggggtcaggttggcacactggtaagtaagtttggcatacagtactcctttttgagctaaatgtgtcatagacttttatttttttaaagccttaacatttgttggagaaaacttttaatattattttattaaagaaaacaaaatgtcaatatgcttgcttaaaaaataatgttcactttggtggaggatactgtgttttggtccctacagtctggattggtataggagaaagtagcagaaagtgacatttgttcttgcctgtaaggttgtggttctgctaggccctcttaaaccaatccatatggttcattctaagaaaaaaagtgaagaaacaaaaacatcaacaagaaagagcaccacggtcatagcatagtatgtgctcaatgtgttgaaataacacggtaatttcatagatatgtctgcccttttgtttaaaatgaatattcttaagtgtggaagactaaatgacccagggcttgacagccatcttcatccaagtcatctgtcttctcttgctggcaggagggatacctctgaaagtctggattggcatagcatgaactagcagaaccataatttacaggtaacaacaaatttaccttccagactcaggacgcgaggtccacctcaggctcctcccaaacaaggaagatctgctccaccacttcctgctccagggccactcgtgagggctatctgggagcgactctccttccctgcaaggtaagctgtcatcaggtcctgcaggacatggccaaatccaaatgctgaggggtccccaacacaaatgtatgacaacctccacatgactgtaagaaaataagtgggtgggaagtcttatttgctgtacttcaagatcattcccagatggtccaacagctcagctggctagtattcagactctcaggaggttgatgcactgcacacacgatgctttatggcagagatacagatttccctctgcagagctgccaaccaaagacaaccatacaatctttaatattaatctgtaagtgggcagagacaagacctgaggttgcatataggtaaccaagaaggaataatttatcccaatgagatggcaaatgtacaaaaagccatcatcaaaatgtcttcagactaacaggcaaagtacatctagcagaggatgatgaaatattatttggaaggggagaaaacattacagaaaattaagtagaaagaaatgagagttcctaactacttacagaattttctggtagaaagtagaaaaagaaaagaaaaactgttcctgccttctccataaagtccactcaccttttttttgagacagagtcttactctgtcgcccaggctggagtgaagtggcgcgatctcggctcactgcaacctccgcctcctgggtccaagccattctcttgcctcagcctcccgagtagctgggattacaggcgcatgccaccaagcctggctaatttttgtatttttagttttgccatgttggccaggctgttctctaacttgtgacctcagacgatctgcctgcctcagcctcccaaagtactgggattacaggcatgagccactgtgcctgtcctctactcatcttttgatttgataccagaatctatcttttggggtggtggtagcaggcagatggggagtccaaggagaggacaaaaaggaaaatgggaggcctagggtggaagtaagattaaggctgagataatgctatgtatatgtaaaaagataggaagcactggttactaatttgaaaggcggccaggtgtggtggctcacgcctgtaatcccagcactttgggaggctgaggcaggtggatcacctgaggtcaggagttcaagagcagcctggccaatatggagaaatcctgtctctattaaaaatacaaaaattagctgggtatggtggcacatgcctgtagttctagctacttgggaggctgaggcaggagaatcacttgaacccaggaggcagaggctgcagtgagccaagattgtgctactgcactccagcctgggcaacagagcaagactctgtctcaaaacaacaacaacaacaacaacaacaacaacaacaacaacaacatgcataaaacagtccataattttttttaaaaaaccatattaaaccaatatcactaaagaattggcatggtgtggtggctcacgccaaggactttgggaggccaaggtgggcagatcacttgaggccaggagttcaagaccagcctgaccaacaaggtgaaaccctgtctctacccaaaacacaaaaattagccgggtgtggtggcacgcacctgtagtcccagctagtcaggaggctgagacacaagaattgcttgaacccaggaggcgaagtttgcagtgagccaagatggtgccattacactccagcctgggtgacagagcaagactacatctcataaaaaaaaaagaaaaaaaaaaaaaggaaaaaaaaatttaagttaggctttctttaaaacaacggaaagacagggccaggcatgatggctcatgcctgtaatcccagtactttgggaggccaaggttgggggattgcttgtacccagcagtttgcaacagcctggacaacatggcgaaaccccgtctttactaaaaatagaaaaaaattaatacaaaaaattatctgggcatggtggtgtgtgcctgtagtcccagctacttgtgaggctgaggtgggagagtcacctgagcccaagaagttgaggctgcagtgagctgtaatcgtgctactggactctagcctgggcaacaggagtgagactgtttaaaaaaaaaaaaaaaaagacaagacaggtgatgtttattatgttagagtccactgctttcccgcagagagtttatttcatggcaacactcagactagctaactgagatggagcactaagaagtaccagaaactaatttaagttttatttccattagaaggaaaatcctgcaatctagaatgctacattgaagattttaactttcgttaaaatggagatgaagtattatgatttatttctaacctttaatagagtcctgtgtgtggggtcacgactagggaaaaaaaaaaccaaaaatgactctacttgaaaaagattttactaataagcacataactgagaaatagataatgagttttactgtaaactattgctactgtacatacacaaaagggcttttatttttctttccttaaaacctaaaagtatatgggatacacactgcaaaaaaacatggtaactttatcccttcaaaaaagctgacatacatataggtcaggcaaaagaaagaggattagagtatgtcacgtaagtaacaagagggtatctgtggaggcagaatgaaaaagtatgcggccaggcgcggtggctcacacctgtaatcccagcactttgggaggccgaggtggacagatcacgaggtcaggagttcgagaacagcctgaccaacatggtgaaaccttgtctctactaaaaatacaaaaattagccgagtgtggttgtgtaggcctgtaatcccagctactcaggaggctgaggcaagagaattgattgaacccgggaagcagaggttgcagtgagtcgagatcacaccactgcactccagcctgactgaaagagtgagactccgcctcaaaaaaaaaaagaaaagaaaagaaaagaaaaagtatgataaactcagctgaaaagtttctgcatctatgtgtacaaatgacttttttttttttttttggtacaaactacaactgtatttgagggagaaaatgggatgatttcaacatttctgatcttagtaaagacagcatcaataagacatgggattattagtttaggtaccaaacagaagaaatctgaagtctgtaaatataaaactgaaagaaaatgactttatgtacatttatacattttagcccgtgctacaatacccaggaaaaaaaaagttttacttgatttcacatggcaaataatgggaaatagaagtgcttcaatttagtctttaagtaattaaaaaataatgaagagtgcttaatttatttatctatttatttttgagatggaattttgctcttattgcttaggctagagtgcagtggcgcaatctcagctcactgcaacctccaccttccggtttcaagcaattctcctgcctcagcctcccaagtctagctaattttttttctatttttagtagagacggggtttcaccatgttgatcaggctggtcttgaactgctgaccttgtgatccgcctgcctcggcctcccaaagtgctgggattacaggcgtgagtcaccgtgcctggcctgaagagcatatatttttatttattttttgagacagtgtctcattctgtcacctaggctggagtgcagtggtacgatcagggctaactgcagccctgacctcctgggctcaagcaattcttccccttcagcctcctgagtagctgggactacaggcatgtgccaccatgcccagctaatttttttgtagaaatgaggtctcactatgttgctcatgctagtctcaaactcctgggctcaactgatcctcctaccttggcctcccaaaatgctgggattacaggcatgagccactgctcttggctagagtgctttaaagccaaatgttctgaatatacagacatcaactgaaggctctgctgggttaaagttaaattactaatagaaaataatctgtgaatttctttgatctatacattgcacctaactggcatataatactgtattactattttggagatttttccaccattaggatagatatggatactgctcttaggggcttaattaaaaagcacattaaaaaaaaaaaaagacttgcattatgaaaaatgggttaaagcccaaagctgaaaattatagtccagctactcaacaaagtagcaagtattcttcatttataagagatggactagctgaaccagatgattttaaagatgccttctagctttgtgatttaggattaattaaaagtgatattacccaattttagtggtttccagcctcaggaactgccaacgatggggtgttcaaatgtcaggagccaaggctctggcagcaacaccccatctctgccagaacaatcaacgcagtttcctcttatcctgtgttctgaggtctaagatttttgttagagaaaaggggaattcttgccaatgtatggcaagtaaagaaaagaaaaaaaaaaagggcaattatgatgcttaaataaaaggtctgaaaaactaacccctagatacaataaaagacatatcggccaatcataatacacagattttttagtagtatatatgtgtgtgtgtatgtgtgtatatatatgtataaacacacacatatatatatacatacacacatatgtatatatgcacatcatatatatatacacatacacatacacttttgtagagacaaggtcttgctatgttgaccaggctggcctcaaactcctggcctcaagccatcttcctaccttggcctcccaaagtgttgggattacaggtataaaccattgtgcccagcctaagtagaaatattaaatgtcaattggggcttgatttccactgccgattataaaaaaaaaattgtccaatactgttgtaattgagtgactgagtataagccactataaatagttacaggaattatcaaaaaagatatagtcctatgatctactctgtagaaagttctttctcagaagcttacagacagaccatggaaagaagaattatattcttgaaattctatgattttagaactaatcacagtaatatctaagtgctggaaaacagaaagtatttatctgggatccttattctagaagaagaggttgggttaagttaaagaagccagggctctgacagcgtccccatcccaattcctgactcaatcacaacagctccgcttccgtgttacatgttacatgctgggtgttctttcataaattatgtttgaaaaagaatcccctaggagcaggaaaggctcccgacttgtactcaagtagaagagaaggcaggtgtagagtctggaacaaagaggccttcctgactaatgaaccagtttcagagcaagtatcaagtcttagaagactttgatgatacaaggcaggatcttgtactcctagtagctcctgactataggttttctaaagacaaagctagtaactctccttagagacccagaaaactgtttcggaggggacaaccaggaagagtcaactctaaaggacaaaatcaagtgcagcaatgaagtgtggcccccttaacaaaatggcttcaaatgaatatgccagttaagagagcaagctctttgtacaaaaacataccaaggaattactaagacagatttttcctgtttgataagaaggcagtaaagagaggtaaatggaacaggaaggcactgggtccacataattgagaaacagatgcctcacttctgagtgagaaagcagaggctccacattcttatcattaatcatgtggtaaggttagctgcttgattccctgatagaacatttcaatctcaaaaaaggcagaattgaacaaagtcaatcaagttcattattaccatagagattttctcataaataactttaatatagtataacaattcaaagatttggacagaaaacaaaatgttatgcttctggggttgaaatgccattttttttaataccctgactacttacagaaaacagtctgatatggtttataatataaaaggagatacaaagagagagaaaggccattccgaaggagacaaaagacaaatgttccaggaatctgagatgaaagagttactgtaactgagaacttaatctaattctgagcgtcaagaaagcaatatcccaagagaagagagttaaagattttctttttaaagatctctctttaaagctgctattgctgtgtatggaatatttctcacaaatgtgacactattatcaacattacagcaaaataaatcacctactttacacagaaataagattccatttaaggcaagatgtcactgactaagggcttcatattgtattttcaagaatgagaattagcaaattaacctgcttgactttgatcaaactcctttaatggccatgaatcagtgaaaattcacttagatttctacaacaggaacctaagctcagctttgttcatatgctgttatctaaaaataaagccctaattttttttttttttttttttttgagactgagtgtcgctctattgcccaggctggagtgcagtggcgtaatctcagctcactgcaacctctgcctcctgggttcaagtgattctcatgcctcagcctctcgagtagctgggactacaggtgcccaccatcacccctggctaatttttgtatttttagtagaaacggggtttcaccatgttggccaggctggtcttgaactcccgacctcaggtgatatgcctgcttcggcctcccaaagtgctgggattacaggcgtgagccaccgtgcccggcctagagccctaagttaacaaaatgttaaatgcaaacaaaagttcatgtattttctaaattctcttttcttcttaaacatgtatagcagcagaaaagatctttaagtattaattaaagttgtagtcaggttaaacaagtattggacagaattaatcaaatctaaaggaataaaataatcaaaaggaaagaacttgtcatcagataaattttaaacataattctaaattattttaaatgctctgtaacaatccacttgctgaaaagaaaaccttttaaagggtttctcatgatatatatatatagcacatattttagctcacaatactatgttactaatagttccttgtttttgtgacttaacatttggagacaaaaaaattagaaaaaagatccttcctcttctgaattatcagttcaaattgcagatttaagtaacatacacaatgaatggtttgttaggtcaaatcgtatgacattgtcaatatgcatatttttgatatacaatactagcaatttcatttactttcattttttgtagaaaagaagtctcactctgtagcccaggatggtcttgaactcctgacctcaagtgatcctcctgcctcattctcccaagttgctaggaatacagttgagccactgtgcccggacaaagctagcagttcaacttaatatgaacatctgatgaggctgggtatggtggctcatacctgtaatcccagcattttgggaggcaaaggtgggaggactgcttgatgccaggagtttgacaccagcctgggcaacacagcgagaccatgtctttacaaaaaaatttaaaaaataaataaatataaaagaaaattagtatttataagagaagactagtacttctccctgtttaaaataacttcaaactgcaatttctctataggaaacttgtacttacaaaacttacagaagttcttgttaactattattaagtataataataaaagaagcatttcagttacaagacataaaaacaaacaccttctaaggataagatgcttaggtgttattgtaccttcagatttaaacaatgactaagtacttcaaaataaggtgagaaattctgtacttacatgtttaaaacaggtaaccggagctgctataaagctattgctattgatgtagttaccccagctgaaaccttccatggagactgctaaaatgaaacaaatttagatgtattataattctcaaatcttttatttataagaaggttatcattgttaaaatgtgtgaaaggacataaaattaatttatcccatttaaagaacgttttctttatgtaaagatcaaataacttctctaaatagcatgagctttggcttatatcatatttgcaaacaaacaggagtttctttatgtttttgagactgagtctccctctgacacctaggctggagtgcagtggcatgatcttggctcactggaacttctgcttcccaggttcaagtgattctcctgcctcagcctcccgagcatctgggactacaggtgcatgccaccacacccagctaatttttgtatttttagtagagacggggtttcaccatattggccaggctggtcttcaactcctgacctcgtgatccacctgtcttggccctgggattacaggtgtgagccaccacgcctggccaggagtttcttaactgttctatacatgacacatgctcctgaggaagtgaggtacaagctctttggttaaggggaacaaagagaagttgagagaagtgtacagaatgacaaacactgttgtggctgcttttgtgcttttatttccattcagttcttgccatgtacctcagtgagatacctaccccatatcacttttaattacctcactttctatttacttctatttactcacttattgcctcttctatttactcacttattgcccttctcactatttactctcttattgctctcctcattatttactcacttattgcttcactttctatttacttctattaaaaatcttctggctgggcgctgtggctcacacctgtattcccagcactttgggaggctgaggtgggtggatcatttgaggtctggagttctagaccagcctggccaacatggtgaaaccctatctctactaaaaatacaaaaataagccaagtgtggtggcgtgcgcctgtagtctcagctacttgggaggctgagacatgagaattgttcgaacccatgaggcagaggttacagtgagccgagatcacgccactgaactctagcctgagtgacagagcaagactctgtctccaaaaaaaaaaaaaaaaaaaaaaaaaaatctattggaaatggtcctttccttaatctcctcttactactcttcttccctcaatccctttgaagcctgctgaacatcccatttctttgcctaatatcttcacaattcaaagaatctgtacatgaaaagtaaataataaaccaaataaaaacattaaggagactgccaaaagcacttgaacttatgcatgcaactatactcttctagagtaatttattgaaatcaaaacaactattaggaagcttagagctgtaatgtgctgacaggacatagaaacagctagttaaacagaattcaaaattacaatgtcattaattaaaactaaatgaatcaatgtcatatatttcacctctgtcagattcaccaatattacctgcttttgtctttgcttgattttgcaaggtagcttgatactgagcatatgcggctagcttagcaactaaaggttgtttctgaagaacttttgctttctttgttggaggcttaccctaaaacaagaaaagttaagtaaataggattctttttcatcccctcaccaccacaatttaactggactgcatactacacattctgcttaagtaaacattgagggtttagaaaattattaaagcagaggaaacatacaagaattttaacatgagaatttttttctggagttctgctacaatgtagttatctaatatgggtagcagagctggcatagactacaacagcaatatgcaaattaatatgttaataaaaaattatatcccacaagatgttaaaatataggctgtggtggatacttgattccttcttacagtagatagaaccagtggttatttactcatgcaggttgccaagcattgctatttatatggtaagagaagataatttaatgttcaaagagcaagtgactgaggtttatacctttagtgctaacgcaaaagatcaatgacaaaatgatcatgggccaaattcacagtgtgacaaactgccatccatttgggtacagaccactgctcaggatctttaggtactgtctatctgaaatatagaaatacatctaagtgatgtatttccttaatttggaggatttaaataaccctttcagtgctatgtaatgatcacaataataaattaaatgagaagactgtgatcatccaataaaaatactgcaaaaatcagttaagttaatgcctttaaaaagtagtttacaatacaatagtaagaacttagtcaaatggtcaagtctccagtcattttgtaggcactgatgtacatttaaagcaagacgattttctttccataccatgagcgttgtcaaaaaggttagttggattaaccaaatacatttggtcaatgtatcaaatggattgtactaaaaagtacaaagcgaggacgatgagaaaataaaaccagagattaaattatttccccccaaatgttgaaagattctaccttgatgttaacacaaaaggaaacaaggggaaacaggaaaatgtcttcaatttctgtatataaaaaagtgtttatacttatttggaaaaaggatattttaattaacttctgcaaataatagtttatttggatagtatgccttatccatttaaaatagtttttcaattttataggctgaacaaactttggggctcacatgtttcctcaagatgtggtataaaaccataactgagtgggcagaggtggagtacagtgaatcacagtcaaatgacagataaatggcaaaagccatagaaataatggatataagtaagaaagtttctgtaccgttacctgaagtctggccaaaatgcttgccttcttggagtttgacgagtaacttcttgaacatgaaacgctacagaaacgctttgttttagagtaaaaagcatctcggacgccaaccatcccacacatctcacaggtagctaattaacaaaataaaaacactggtgttatgatgatataataaaatcaatcttcatctaacagtttaaataatttctcctgccatctgaaagttttaattaaaaaatttgccttgaacatttcttctatctcctatacaaatgataaagaagcctgcacagagaagtcagagagaacactggtattgtgccatggtgatgggctctataaggtctgatagtggcttgaggtctgaaaggtttacaaagggtcaacagaaacagggcagatacgctggattcaaccaacatttccttagtgcttaccatgtgccaggcattttcatatacaacaaattccagcttttgaaatgattacacttgaaagatgaaaagtgccacacaactgaggattaataacaaagtataacacaggcctttaaaatactgcaaaggttgaaacttaaaaagaggtaatacttggaaaaatgctaagagctgtatgaggattccttcaagttatgtttaggggacaaaaaaaaggaatgggttcaaagtttgaggtagaggccaggtgtagtgactcatgccagtaatcccagaactttgggaggccgaggcaggagaactggctcaaggccaggagtatgggaccagcctgggcaagatagcaagatccagtatcttcaaaaaataaaaataaaaaagagccaggcatggtagcacacacctgtagtcccagctattcaggaggctgaggcgggaggactgcttaagtccaggagttcagggttacagtgagctatgatcgcaccactgcactctcgcctggacaacagaaggagatcctgaatcaaaaacaaaaaacaaaacaaaacaaacaaacaaaaaacaaaacaagtttgacgtaggtgctctattattaatcagtgatagtgggaaacagcagaactcttggctactattgcataatagacaataatttgaaaggtagaattagaacaaggttcacaagaattgaagtttaaaaaagataaacaaaaagtaacatagcaaataactgccttagtgagttaaagcctccacccaaacaggtaaactggagaagcctgtagtgtaactggtacggttggctctgtgcttccatgggttctgtatctgtggattcaaccaaaagcagactgaaaatattttgggaaaaaaaaattgcgtctgtactgaccatacacagaccgtttttttcttattattctctaaacagtatagtattaacaattatttgcatggcatttacattgtattagctataagtaatctagacatgatttaaagtatatggaaggatgtgcgtaagttatatgtaaataccacatcattttatataaggaatttgagcatttgtgaatttggtatctgagggaaatcttggaaccaatcccccatggataccaggggacaactgtacttacttacaaatctatgagaaatcatggaaaaaagataaaaatgccagaagattgcaggtgaacaaagggtatctactgggagagaaaactaaacggttttctgttgcaaaaattctagaatagattgttaaagaacgttctgaacacctagatagaaaagttgtgatcccaaggaaacagtgaatctttgccagaaattatacatgtcaaactagaattcccacaagtaggatgcaagttccatcaggacaggaaacttattctgtgttgttcatctgctatctccagtatttaaaatagatgctagcacacacaaagcttcaataaacgttatttccttttatgataggattactaggctggtatgttataatcaaaccatggcaagaatatacactaacaggagctaacacatttgataaaatctcatgtagctttgataacaggactgagaaatttcagctggagtagaagacacgggtagtttttttgttttgttttgtttgttttttttgagacacagtctcgctctgtcacccaggctggagtgcagtggcaccatctcggctcactacaacctccgccttccggattcaagcaattctcctgcctcagcctcctgagtagctgggactacaggcacacgccaccatgcctggctaattttttgttagagatggggtttcaccatgttgcccaggctggtctcgaactcctgagcttaggcaatctgcccgcctcagcctcccaaagtactaggattacaggtgtgagccaccaacgcccagcgacacccaggtaggttttaactggaggatgaccaaacccagtgaatcctgataaatgaagttttttgatatggtctgcatgactctctatcagcccctgagctgttcataattttttttagttttttgaagtctcgctctgtagccaggctggagtgcagtggcgtgatctcagctcactgcaacctctgcctcctgggtacaagcaattctcctgcctcagcctcctgaatagctgggactacaggcacatgacaccatgcccagctaatttttttcaattttttttcgcagagacggggtttcaccatgttgtccaggatggtctcgatttcttgacctcatgatctgcctgcctcggcctcccaaagtgctgggattacaggcatgagccaccgcacctggccacgctattcatctttttaaccaaaagactagaataggaccaacagggcagaattatcaaaactgaaaatgatataaaactggaagattagatgacacagcattcaatattagatgacagaattagcaataaaaaatttctaagactgggcagggtgcagtggctcacacctgtaatcccagcactttgggaggctgaggcaggtggatcgcttgagttcaggagtttgagaccagcctgggcaatatggtgaaaattgcccgtctctgaaaaaaatacaaaaattagccaggtatggtagcatgtgcctacagtaccagctacttgggaggatgaggtgagaggatcacctgagctcgggaggcagagattgcagtgagtcgagatcttgccgctgccattccagcctgggtaatacagcaagactgtctcaacaacaacaacaacaaaagcctgggcgtggtggctcaccccagtaatcccagcactttgagaggccgaggcaggcagattgcttaaggtcaggagtttgagaccggcctggccaatatggtgaaaccctatctttactaaaaatatgaaaatacgccaggcatggtggtgcaggcctgtagtcccagctacttgcgaggctgaggcaggagaattgcttgaacccgggaggtggaggctacagtgagccgagattgcaccactgcactccagcttgggcatcagagtgagactgtctcaacaacaacaacaacaatttctaagactgaaagttagtaagaaaaaggttatatagagagatccaaagtcctacatcttgggtttaaaaagttaactgcagtaagactggtttaaactgggttagttcatgtggtaaaggtcaaaggatatcagttatttacaagttcattatcattttcaagaaagctaaagcaattttggtggcatgaatggaaacagtgccttgaaaaggggagataaaggttgaatgatcttctggcctcacacagggtgaccatttgtttggttcccacatttccaggatgtgggactttcaatggtaaaaccaggacagttccaggcaaatcaggatgacttgttaccctactaccacataatctgaagtatccccagaatacagtgaccaggatatcaaagaattaaatcactgggatacaccatgagagaaatggttgaagcaactatggctccttggtatgccttagagataaactagaacgaagggttctattgtggagaaaaaagatgtcattagaacaaggattagaattattctgtgtagctttaaaaagcaaaactttccagactcccagaagcaaagttaaaaaggcaaaactaagaccaaaagataaaagttggaggaaggaaattttggttcaataaagacactattctagtaatttgagatactaagaaatgaaactgcttcctttttcatttcctttttctttttcaagccagattttaggcagagagaaattccttactgagtcagagaatatccaagcaccagttatgttaaaacggaaattataagaaattaatatagaggagggagcccaacctcgaatgtctctttcaattttataagcccatgatcctatgcacttatactttcagttacagaggcatttcttatctaattactaaatttatatccacatgaagtttctcactggcctttttttgttgttgttgtatttgctttccaccaggaggtaggcaaaataaagagttaaacaccaactcagtgatcttatctcgaattataaacgtcagctcttcaaactgccccttaataattctaaggaaggggaaatgacagaagaaaccaaatgaaaacacacccttaaacataaagctgtagaacaggtgaaggttataaatactcacccatgccagatttaccatctgggtatgtgtagacttgcccattgtttttgataatcgggagattagaaggtaaaggagcgacttcttcctcactctcttcggagctggagctgctgcttgtgtcctcactgcagctatcataaccgtcaaacatcccgaaagaatctcttcttttcctttcagatcgtgaagaatgttcagtctttgaagtaagagaaaccagtgacacatgacacaacactcatacacaccccctaaaagaccctagcacaaattctggtaaatgagatttgataaatgaaaacgcagccctgagaaataaccattttctttcttttttttttctttttttaaaaaatgctttgagacagagtctcgctctgtcacccaggctggagtgcagtgacaatcttcggtcactgcaacctccacctcccgcactcagatgatcctcccaccttggcctcctgagtagctgggactacaggcaagtgccaccatcccataaacatttttgtgtttttttttttgtagagatggggttctgccatgttgcccaggctggtctttaattcctcgtctcaagcaatctgcccactcaagcctcccagagtgctcggattatggatgtgagccacctccctgcctcaagggatgtcctgcctctgcatcccaaagcactgggatgacaggcgtgagccagtgtgcctcgcccagatttcttttttctttttaattatgggatgggcgtggtggctcatgcctatattcctagcactttttttttttgagactcggtctcactctgttgcccaggctggagtgcagtggcacaatctcggctcactgcaacctctgcctcctgggttcaagtgattctcctgcctcagtctcctgagtagctgtgattacaggtgcatgccaccacacccagctaattttcgtatttttagtagagacagggttttgccatgttggccaggctgttctcaaactcctgaactcaggtgatccgcccacctcggcctcccaaagtgctgagattacaggtgtgaggcaccacacccagcctaatcctagcactttgggaggccgaggtgggatgatagcttgagcccaggagtttgagaccagcctgggcaacatggtgagactcccactctaccaaaaaaaaacacaaaaaaacaaaacaaaacaaaaaaaccatataaaaataattgtgggccaggcatggtggctcactcctataatcccagcactttgggaggccgaggtggtcagaggagtttgaggagttgaggagtttgagaccagcctgggcaacatgacgaaaccctgactctacaaaaaatgcaaaaattagctgagtgtggtggcacgcatctgtagtcccagctatgtgggaggatcactagagcctgggaggtggaggttgcagtgagttgagatcatgccactgcactccagcctgtgtgacagagagagaccatgtctcaaaaataaaataaaataaaataaaaatcgtggtgaaatatacataacaaacatgatttttaaatttgcctttcatctctaaaactaaacttctagaccaatttggagtatccagaaaatatggatgctttttttctttctttttttgatgacagagtctcgctctgtcacccaggctggagtgcagtggtatgatctcagctcactgcaatctccatctcccaggctcatgtgattcttgtgcctcagtctctcgagtagctgggactacaggtgagtgccaacatgcccagctaacttttgtacttttagtagagatggggttttgctatgttggtgaggatggtattgaactcctggcctcaagtgatcgcctgccttggcttcccaaagtgctgggattacaggtgtgaggcaccgcacccagccaacacacagacgtttttaaaaattgctttgggctgggcgcggtgactcacgcctgtaatcccagtacttcgggaggccgaggcaggcggatcacaaggtcaggagatcgagaccatcctggctaacacggtgaaaccccgcctctactaaaaatataaaaaattagttgggtgtggtgccaggtgcctgtagtcccagctactggggaggatgaggcaggagaatggcatgaacctgggaggcggagcttgcagtgagctgagattgagccactgcattccagcctgggtgacagagcgagactctgtctccaaaaaaaaaaaaaaaaaaaaaaaaaattgctttgctggctgggcatggtggctcgcatctgtaatcctagtactttgagaagtcaaggctggtggattgcttgagcccaggagttcaagactagcctgggcaatatggcaaaactccatctctacaaaaaatacaaaaattagccaagtgtggtggcttgcacctgtggtcccagctacttgggaggctgaagtaggaggatagcttgacctcaggaggtcgaggctgcagtgagccacgatcgtgcccctgcacttcagcttgggtgactgagtgagaccctgtctcaaactcaaaaccaagaaccactttgcttgatactttatcatgttggaaaagaaaaaaaaaatcactgctaaaagctctgaagggtctaacagaaaattttgcctttcagctgggtgcagtggctcacgcctgtaatcccagtactttgggaggctgaggcggggagatcacctgaggtcaggagtttgagaccagcctagtccacgtggggaaatcccgtctctactaaaaatatatacaaattagccgagcgtggtggtgcatgcctgtagtcccagctacttgggaggctgaggcacgagaatcgcttgaacccaggaggcagaggttgcagtcagccaagattgcaccactgcactccagcctgggcgacagagcaagattccgtctcaagaaaaaaaaaaaaaaagaaaattttaccttttacaattttaagatggcaaatatttcagaaattgtaggagataatatttctacatatatatttattcagtttttaaaaaaacataaacaatggtttaaaacccaacccaattttctcaagctaaacagtatttcctcagaaaaccaaataccacatgttctcacttataagtgggagctaaatgatgagaacacatggacacatagaggaaacagcagacactggggcctattggagggtagagggtgggaggagggagaggaccaggaaaaataacgaatgagtactaggctactaggcttagtatctgggtgatgaaataatctgttcgacaaacccccatgacacacatttacccacgtagcaaacctgcacaagtacccatgaacttaaaatagaagtattaaaaaaatttccttttcaaagaaagatacaaagaagttatatcatctttagtgaatgctggtcttatgtctcctccaagatgttgcctcattcaaaccacgaaaaaaaaaaaaaaacaagacaaaactaatattgctactctaaccatttccaaaataaattgcataactacaggctttgtgagaagtgaaaagaaaataggagacaataaaaaggacaaaaaaaaaaaaaaattgggaggctgggcgcggtgggtcacgcctgtaattccagcactttgggaggctgaggtcaggagtttgagaccagcctggccaatatggcgaaaccccacctctactaaaaatacaaaaaaaaattagccgggagcagtggtaggcgcccgtaatcccagctactcgggaggctgaggcagggagaaatgcttgaacccgggaggcagagattgcagtgagctgagatggcgccactgtactccagcctgggtgacagagtaagagtccttctcgggggtgggtgggtgggaaaagggaaaggtatctcaaatgcaaaataaaaacaggagacgggccactggctgaggcccagctcatgtccctaaacctaacaaacaaacaaacaacagaaaaaaaaaaacaagaaaaagaaaaaacaaatgggccaggtgcagtgtctcacgcctgtaatcccagcactctgggaggccgaggctggaggactgcctgagcccaggagttcaagaccaatctgggcaacatagggagaccctatctctactaaacaaacaagaaaacaaaaccaaaccattacaaaacattaagtgagttataaccagagagatgaaaactatcaactcaagaatctttgagatttggcacctatcctttttcttttgctacacagatacagttttttttttaatcctctcacactacactttaagctaaaatttttttttcctggctagtctaccttctttttggtattaaatgaccacaaaacaaagctagtattacatgaccagtaacaaggctgaaatctgttgtcctaagtttgacaagataaaaccatccacatgtcattgtcaggtattaaacatttgcattgagacaggaaactaattttcagttgtatcaggtgcagctatgaaagctacaaaaactgatttcttagtccacacaatggaaatattacattaccaaagaagttcccttgggaggttatatacacgttctaataatgttgccacagcccaggcatttttagtatacttttttttttttttttttgagacagagtcttgctctgtcacccaggctggagtgcagtggcgcaatcttggctcactgcaagctccgtctcctgggttcacgccattctcctgcctcagcatcccaagtagatgggattacaggcgcccaccaccacgcccggctaattttttgtatttttagtagagatgggatttcacctcgttaaccaggatggtctcgatctcctgacctcatgatccccgtctcggcctcccaaaatgctgggattacaggcgtgagccactgcacccagccagtatacttttttagtactgccttttagatacaattttaaaaagaaaaacctatcatttgtggacacttcagaattattcctcctgttccctgcatcagtcttccctagcttggtcatctaacctgattcagcagatttggttctgaataacttttaggtatttctataaatcaaaggtattttcaaagaatcaagatttgctacaatcagaagatctaaaagatgaagtgagaccttgaaggcaatacaaaagaaaagttctaatagcactttgaactgacaatgtggaagggaatgggacaaccacatttagatacagtgtggtgttatgaacacagaattctgacaaacatgggttaagactcaactttgatacttgttagctgtgaacttgtgcaagttatgggtttcttctcttactcattcgacatttatcaagtatttgtgggtctcatagtaaccaaggctaaagacagaaaagcatgcaaagcagacaagatccatggttttcaggaagactgtaagctactggtaggaggaaaccaagcaaggctgtgtgagggcagagtcactcaagcaggggcgattagctgagattcagcagtgaggaacaatctcagtgaggtaagaccatgaggacaaaaaggcagccacttaaatatctgatgctggcatattctaggcaaagggaagtgcaagacgagggcttttgggctagaataaacttagcacactcggaggccagtgtggctggcacccagtgtgaaaggtatgggagaggtcagaggatgtaggggccagattatgagggcccttgtaggccagggtaagaaactgatttttttcctggaggcaatgggaagacattataaactatttatcacagagcctgctctacacatttaataaacactggctagattttacgttctaatagagtcatacagctcacctccatttggaggcgaccttctatactcatagttttttttgttttttgagacagtcttgctctgttgcccaggttggagtgcagtggcacgatctcagctcactgcaacctccgcctcctgagttcaagcgattcttctgcctcagcctcttgagtagctgggactacaggcgcctgccaccacgccaggctaacttttgtatttttagtagagatggggtttcgccatgttggtcaggctggtctcaaactcctgaccttgtgatctgcccgccttggcctcccaaagtgctaggattacaggtgtgagccaccagcccggccagaccttttatatctatagttttcatataggcttgtctactattaatatatagccaacttggttagcagctaatgtaagattattgacccttaaatgtcaacccagaatatcttattctgactctattttcagggaatatagccttaaaatttcaggaggtcaatgactacagatattttgttttcaataattacaagctgttagtattttttttttaaaagtaccatggtcaaagatgtttgggaaattttcctcacgtcaaggtcttctggagactttaatatgcttatgaacattatagtgattaaagaggaatatacagtatgcagtcttttctagagtaccttttaggactgttttagagaaatgttctctgatcttttccatggtcctagcacacacagaaaatgatcatctgcacaacacaaggggaataaacccctggatgcacccagcctaaggcctctgactgtcctaagtattggaggaatgaatacctggacatactcctaatctaaggaacactagttcataagctttattctatttaggcaatgtggttttctgaagtgatttttttttttgtactttttcccccttgcaaacactacagtgacttatctaagttttttttttatatatacattaggatagaataccagcgaactaaatattaatatataaactataattgatttatcctatgtaaaacttaccttttatttactatgagggcgcttaactggaaactcctacattagaccaaaacccctgaaagggtctgcaacttcattaaaaggatgagtgagaaagaagttgattatactcaaaagacctatgagggagcatttcaggtccacgctctcggtgaagaggcttctctgggattttgtaatcacaggcctgacctcatgagttaagtctgaggttgaaattttctcttccctctatggtcagggaactcccaggccaagaaattaaagtggttccaggctaccagtgccctttgatacctagcagaagcaaacctaaattagatcaggaaataagtcacctaccattcaggcctttcagcattcccaccaattttatcaagtatgagcgcacgatcaaatagcaaacacataataagtaatccaccatgagcaagcatcagcagaaactgattaagaatccccaatactttgggcattggaattgacagagacagaacataaaacaagcattatgagttgtttaataagaaaaatattattgaaaaataagcaatataaaacaaacaccaacttattagacatggctaaagagaattaaaaaatggaagatacatgataaacactcaaaatgcagcaaagaaaaatagaaaactggaaaacaagatgtcaaaataagagaacagaatgtaaagatccaataaaagtctaataagaattcttaaaggagtgagtatggagaatggagaaaggcaatgttgaattagatactggctaagaattctgcagaaatgagaacatgaattaggccaggcacagtggctcatgtctataatcccagaactgtgggagaccaaggcaggaggaccgcttgaggccaggagttcgagaccagcctgagcaacaaagtgtgacactgcctctacaaaaaaataaaaataaaaataaaaaaaattaggcagctgtggtggtatgtgcttgtggtcccagctactcaggaggctgagatgagaggatcacttgagcacaggagattcagtctgcagtgaggtgcaatcacaattgctccactgcactccagcctaggtgacagagcgagaccttccctcaccaaaaaaaaaaaaaaaaaaaaaaaaagtgagggagagagagagaacatgaattcacagataaaactataatgtaaattaggcacaacaaaaaggtatccacatctaaacagaccatagtaaaactgcagaacatcaaaggaaagatattaaaaagcaaccaatcaccacagtgaagctcagcagtcaacaagctctactcaggtagacagtctaatcaggtgcttagtacctaaacattaaggcctctaagtatatgaaaggacaaaacaaatctccaggaaagatgcatctataggaaacagaagaaaagcaaacagcataagaaaacgctaaaaaaaattacgaattcttcagagatgtaagaataggatactatcagagaacaagatagaccttggaatttaaaaacaaaaatgggaaaacaaattcaataaatggatgataaagtcaaggaaatctttcaaaaagcgagtgtgtgtgtatacatgagacaaaaagctaggcaacaagaaagaaaaaaataagagttcaacctagaagatccaaaatccaattaagagatattcaagaaagagaaaacagatgggaacaaagttacataaaagaaaaaaacaaaacaaaacaaatttccaagaccaaaatggggcatccatatttaaagagaccatataagcccagcttaatgatttaaaaaaaaatttataccaacatgcatcattataacaattcacaactctgccaatactggtattaaaagcttcggcactatgctacacaaaaagagaagggaatcaaaatatcagtggacttctcaacagcaagactgatcaatgtattgccttcagatttctaaaaattcttaccagaaaatctatactcaaagctccaagtgaaaataaatgaaactaaaaatagaaaaaaggaaaaaaaaagaaaacaaagttggttttttgagatcaataaaactgataaacctcaaatcagagataggaaaaacaaaaaaaagaagacaaaatatcccaatatcataaatgaaagaagtaacaaggccaggcgtgatggctcatgcctgtaattccagcactctgggaggccgaggtgggtggatcacctgaggtcgtcaggagttcgagaccaacctggccaatgtagcaaaaccccatctctactaaaaatacaaatactagctgggtgtagtggcatgcacctgtaatcccagcgactcaggaggctgagaaaggaaaatcgcttgaacccgggagacagaggttgcagtgagctgagattgcaccactgcactccagcttgggccacagaggagagactttgtccccgtctccaaaaaaaaaaaaaaaaaaaaagtaacattgctgcagattctacagatattaaaatattaaaaagactatattatcaacaaccttatgacattaaatttgacaacttggatgaaatggacaaattccttcagagacatagaaccaaatgtcactcataaagaaacatacctgaataatcctgtatctactgaaaaaactaaatttgttaaagatcttcccacaaatgaaactctaggctcaaatggctttactggggaattctacttaggaaatactacagactttataccaacttttctttttgttttttgagacgaagtttcgctcttgtcgcccaggctggagcgcaatggtgcaatctcggctcaccgcaacctccgcctcccaggttcaagcaattctcctgcctcagcctcccaagtagctgggattacaggcatataccaccacgcctggctaattttttttgtattttcagtagagatggagtttctccatgttggtcaggttggtctcaaactcctgactcaggtgatctgcccaccttggcctcccaaagtgctgggattacaggcatgagccaccacgcccggcctatatatcaacttttctagaatattgaataggatgaaacagtttacaaactcattctactaggccagtatcactttgatccccaaaccagataaagcaattagaagaaaactacagaataaatatcatgaatataggatgcaattttttttttcttttgagacagagtctcactgtgttgtccaggctggagtgcagcggtgacatcttggcttactgcgacttccgcctcctgggttcaagctattctcgtgccttagcctcctgagtagctgggattacaggcatgtgccatcatacccagctaatttttgtatttttagtagagatggggggttacaccatgttggccaggctggactcgaactcctgac
